(19) United States
(12) Patent Application Publication
(10) Pub. No.: US 2003/0027139 A1
(43) Pub. Date: Feb. 6, 2003

(54) Polynucleotides encoding novel secreted proteins

(76) Inventors: Kenneth Jacobs, Newton, MA (US); John McCoy, Reading, MA (US); Edward R. LaVallie, Harvard, MA (US); Lisa Collins-Racie, Acton, MA (US); Cheryl Evans, Germantown, MD (US); David Merberg, Acton, MA (US); Maurice Treacy, Dun Laoghaire (IE); Michael J. Agostino, Andover, MA (US); Michael R. Bowman, Westwood, MA (US); Vikki Spaulding, Lowell, MA (US); Gordon G. Wong, Brookline, MA (US); Hilary F. Clark, San Francisco, CA (US); Kim Fechtel, Arlington, MA (US); Steven H. Howes, Cambridge, MA (US); Richard J. Resnick, Somerville, MA (US); Kalmalakar Gulukota, Lawrenceville, NJ (US); James R. Graham, Arlington, MA (US)

Correspondence Address: LAHIVE & COCKFIELD, 28 STATE STREET, BOSTON, MA, 02109, US

(21) Appl. No.: 09/822,846

(22) Filed: Mar. 29, 2001

Related U.S. Application Data
(60) Provisional application No. 60/195,605, filed on Apr. 6, 2000.

(51) Int. Cl. C12Q 1/68; C07H 21/04; C12N 9/00; C12N 5/06; C12P 21/02

(52) U.S. Cl. 435/6; 435/69.1; 435/183; 435/320.1; 435/325; 536/23.2

(57) ABSTRACT

Isolated polynucleotides which have been derived from a variety of human tissue sources, and which encode novel secreted proteins, are provided. Also provided are methods for producing proteins using these polynucleotides, and the proteins so produced.

### RELATED APPLICATIONS

[0001] This application claims the benefit of prior-filed provisional patent application U.S. Ser. No. 60/195,605 entitled “Polynucleotides Encoding Novel Secreted Proteins”, filed Apr. 6, 2000. The content of the above-referenced application is incorporated in its entirety.

### FIELD OF THE INVENTION

[0002] The present invention provides novel polynucleotides and proteins encoded by such polynucleotides, along with therapeutic, diagnostic and research utilities for these polynucleotides and proteins.

### BACKGROUND OF THE INVENTION

[0003] Gargantuan efforts have been employed by various investigational projects to randomly sequence portions of naturally-occurring cDNAs. The rationale behind this approach to identification and sequencing genes is founded in two basic principles: (1) that transcribed cDNAs represent the product of the most important genes, namely those that are actually expressed in vivo, and (2) that efforts to sequence genes and other portions of the genome of target organisms which are not actually expressed wastes substantial effort on areas not likely to yield genetic information of therapeutic importance. Thus, the high-throughput sequencing efforts focus on only those portions of the genome which are expressed. The randomly produced cDNA sequences represent “expressed sequence tags” or “ESTs”, which identify and can be used as probes for the longer, full-length cDNA or genomic sequence from which they were transcribed.

[0004] Although this “shortcut” approach to genomic sequencing presents savings of effort compared to sequencing of the complete genome, it still produced a vast array of ESTs which may not be directly useful as protein therapeutics. To date, the majority of protein-related drug discovery has focused on the use of secreted proteins to produce a desired therapeutic effect. Since the EST approach theoretically identifies all expressed proteins, it produces an EST library which contains a mixture of secreted proteins (such as hormones, cytokines and receptors) and non-secreted proteins (such as, for example, metabolic enzymes and cellular structural proteins), without identifying which ESTs correspond to proteins falling into either category. As a result, these methods are not optimally tailored to the needs of investigators searching for secreted proteins because they must separate the secreted “wheat” from the non-secreted “chaff”, wasting effort and resources in the process.

[0005] Technology aimed at the discovery of protein factors (including e.g., cytokines, such as lymphokines, interferons, CSFs and interleukins) has matured rapidly over the past decade. The now routine hybridization cloning and expression cloning techniques clone novel polynucleotides “directly” in the sense that they rely on information directly related to the discovered protein (i.e., partial DNA/amino acid sequence of the protein in the case of hybridization cloning; activity of the protein in the case of expression cloning).

[0006] More recent “indirect” cloning techniques such as signal sequence cloning, which isolates DNA sequences based on the presence of a now well-recognized secretory leader sequence motif, as well as various PCR-based or low stringency hybridization cloning techniques, have advanced the state of the art by making available large numbers of DNA/amino acid sequences for proteins that are known to have biological activity by virtue of their secreted nature in the case of leader sequence cloning, or by virtue of the cell or tissue source in the case of PCR-based techniques. Co-assigned U.S. Pat. No. 5,536,637, which is incorporated herein by reference, provides methods for focusing genomic sequencing efforts on sequences encoding the secreted proteins which are of most interest for identification of protein therapeutics. The '637 patent discloses a “signal sequence trap” which selectively identifies partial sequences encoding secreted proteins, namely “secreted expressed sequence tags” or “sESTs”. The sequences of these sESTs can be used to design probes to isolate the full-length cDNA clones that encode secreted proteins.

[0007] It is to these secreted proteins and the full-length polynucleotides encoding them that the present invention is directed.

### SUMMARY OF THE INVENTION

[0008] The present invention provides for full-length cDNAs isolated from a variety of human RNA/cDNA sources which encode novel secreted proteins.

[0009] In preferred embodiments, the present invention provides an isolated polynucleotide comprising a nucleotide sequence selected from the group consisting of:

[0010] SEQ ID NO: 1, SEQ ID NO: 2, SEQ ID NO: 3, SEQ ID NO: 4, SEQ ID NO: 5, SEQ ID NO: 6, SEQ ID NO: 7, SEQ ID NO: 8, SEQ ID NO: 9, SEQ ID NO: 10, SEQ ID NO: 11, SEQ ID NO: 12, SEQ ID NO: 13, SEQ ID NO: 14, SEQ ID NO: 15, SEQ ID NO: 16, SEQ ID NO: 17, SEQ ID NO: 18, SEQ ID NO: 19, SEQ ID NO: 20, SEQ ID NO: 21, SEQ ID NO: 22, SEQ ID NO: 23, SEQ ID NO: 24, SEQ ID NO: 25, SEQ ID NO: 26, SEQ ID NO: 27, SEQ ID NO: 28, SEQ ID NO: 29, SEQ ID NO: 30, SEQ ID NO: 31, SEQ ID NO: 32, SEQ ID NO: 33, SEQ ID NO: 34, SEQ ID NO: 35, SEQ ID NO: 36, SEQ ID NO: 37, SEQ ID NO: 38, SEQ ID NO: 39, SEQ ID NO: 40, SEQ ID NO: 41, SEQ ID NO: 42, SEQ ID NO: 43, SEQ ID NO: 44, SEQ ID NO: 45, SEQ ID NO: 46, SEQ ID NO: 47, SEQ ID NO: 48, SEQ ID NO: 49, SEQ ID NO: 50, SEQ ID NO: 51, SEQ ID NO: 52, SEQ ID NO: 53, SEQ ID NO: 54, SEQ ID NO: 55, SEQ ID NO: 56, SEQ ID NO: 57, SEQ ID NO: 58, SEQ ID NO: 59, SEQ ID NO: 60, SEQ ID NO: 61, SEQ ID NO: 62, SEQ ID NO: 63, SEQ ID NO: 64, SEQ ID NO: 65, SEQ ID NO: 66, SEQ ID NO: 67, SEQ ID NO: 68, SEQ ID NO: 69, SEQ ID NO: 70, SEQ ID NO: 71, SEQ ID NO: 72, SEQ ID NO: 73, SEQ ID NO: 74, SEQ ID NO: 75, SEQ ID NO: 76, SEQ ID NO: 77, SEQ ID NO: 78, SEQ ID NO: 79, SEQ ID NO: 80, SEQ ID NO: 81, SEQ ID NO: 82, SEQ ID NO: 83, SEQ ID NO: 84, SEQ ID NO: 85, SEQ ID NO: 86, SEQ ID NO: 87, SEQ ID NO: 88, SEQ ID NO: 89, SEQ ID NO: 90, SEQ ID NO: 91, SEQ ID NO: 92, SEQ ID NO: 93, SEQ ID NO: 94, SEQ ID NO: 95, SEQ ID NO: 96, SEQ ID NO: 97, SEQ ID NO: 98, SEQ ID NO: 99, SEQ ID NO: 100, SEQ ID NO: 101, SEQ ID NO: 102, SEQ ID NO: 103, SEQ ID NO: 104, SEQ ID NO: 105, SEQ ID NO: 106, SEQ ID NO: 107, SEQ ID NO: 108, SEQ ID NO: 109, SEQ ID NO: 110, SEQ ID NO: 111, SEQ ID NO: 112, SEQ ID NO: 113, SEQ ID NO: 114, SEQ ID NO: 115, SEQ ID NO: 116, SEQ ID NO: 117, SEQ ID NO: 118, SEQ ID NO: 119, SEQ ID NO: 120, SEQ ID NO: 121, SEQ ID NO: 122, SEQ ID NO: 123, SEQ ID NO: 124, SEQ ID NO: 125, SEQ ID NO: 126, SEQ ID NO: 127, SEQ ID NO: 128, SEQ ID NO: 129, SEQ ID NO: 130, SEQ ID NO: 131, SEQ ID NO: 132, SEQ ID NO: 133, SEQ ID NO: 134, SEQ ID NO: 135, SEQ ID NO: 136, SEQ ID NO: 137, SEQ ID NO: 138, SEQ ID NO: 139, SEQ ID NO: 140, SEQ ID NO: 141, SEQ ID NO: 142, SEQ ID NO: 143, SEQ ID NO: 144, SEQ ID NO: 145, SEQ ID NO: 146, SEQ ID NO: 147, SEQ ID NO: 148, SEQ ID NO: 149, SEQ ID NO: 150, SEQ ID NO: 151, SEQ ID NO: 152, SEQ ID NO: 153, SEQ ID NO: 154, SEQ ID NO: 155, SEQ ID NO: 156, SEQ ID NO: 157, SEQ ID NO: 158, SEQ ID NO: 159, SEQ ID NO: 160, SEQ ID NO: 161, SEQ ID NO: 162, SEQ ID NO: 163, SEQ ID NO: 164, SEQ ID NO: 165, SEQ ID NO: 166, SEQ ID NO: 167, SEQ ID NO: 168, SEQ ID NO: 169, SEQ ID NO: 170, SEQ ID NO: 171, SEQ ID NO: 172, SEQ ID NO: 173, SEQ ID NO: 174, SEQ ID NO: 175, SEQ ID NO: 176, SEQ ID NO: 177, SEQ ID NO: 178, SEQ ID NO: 179, SEQ ID NO: 180, SEQ ID NO: 181, SEQ ID NO: 182, SEQ ID NO: 183, SEQ ID NO: 184, SEQ ID NO: 185, SEQ ID NO: 186, SEQ ID NO: 187, SEQ ID NO: 188, SEQ ID NO: 189, SEQ ID NO: 190, SEQ ID NO: 191, SEQ ID NO: 192, SEQ ID NO: 193, SEQ ID NO: 194, SEQ ID NO: 195, SEQ ID NO: 196, SEQ ID NO: 197, SEQ ID NO: 198, SEQ ID NO: 199, SEQ ID NO: 200, SEQ ID NO: 201, SEQ ID NO: 202, SEQ ID NO: 203, SEQ ID NO: 204, SEQ ID NO: 205, SEQ ID NO: 206, SEQ ID NO: 207, SEQ ID NO: 208, SEQ ID NO: 209, SEQ ID NO: 210, SEQ ID NO: 211, SEQ ID NO: 212, SEQ ID NO: 213, SEQ ID NO: 214, SEQ ID NO: 215, SEQ ID NO: 216, SEQ ID NO: 217, SEQ ID NO: 218, SEQ ID NO: 219, SEQ ID NO: 220, SEQ ID NO: 221, SEQ ID NO: 222, SEQ ID NO: 223, SEQ ID NO: 224, SEQ ID NO: 225, SEQ ID NO: 226, SEQ ID NO: 227, SEQ ID NO: 228, SEQ ID NO: 229, SEQ ID NO: 230, SEQ ID NO: 231, SEQ ID NO: 232, SEQ ID NO: 233, SEQ ID NO: 234, SEQ ID NO: 235, SEQ ID NO: 236, SEQ ID NO: 237, SEQ ID NO: 238, SEQ ID NO: 239, SEQ ID NO: 240, SEQ ID NO: 241, SEQ ID NO: 242, SEQ ID NO: 243, SEQ ID NO: 244, SEQ ID NO: 245, SEQ ID NO: 246, SEQ ID NO: 247, SEQ ID NO: 248, SEQ ID NO: 249, SEQ ID NO: 250, SEQ ID NO: 251, SEQ ID NO: 252, SEQ ID NO: 253, SEQ ID NO: 254, SEQ ID NO: 255, SEQ ID NO: 256, SEQ ID NO: 257, SEQ ID NO: 258, SEQ ID NO: 259, SEQ ID NO: 260, SEQ ID NO: 261, SEQ ID NO: 262, SEQ ID NO: 263, SEQ ID NO: 264, SEQ ID NO: 265, SEQ ID NO: 266, SEQ ID NO: 267, SEQ ID NO: 268, SEQ ID NO: 269, SEQ ID NO: 270, SEQ ID NO: 271, SEQ ID NO: 272, SEQ ID NO: 273, SEQ ID NO: 274, SEQ ID NO: 275, SEQ ID NO: 276, SEQ ID NO: 277, SEQ ID NO: 278, SEQ ID NO: 279, SEQ ID NO: 280, SEQ ID NO: 281, SEQ ID NO: 282, SEQ ID NO: 283, SEQ ID NO: 284, SEQ ID NO: 285, SEQ ID NO: 286, SEQ ID NO: 287, SEQ ID NO: 288, SEQ ID NO: 289, SEQ ID NO: 290, SEQ ID NO: 291, SEQ ID NO: 292, SEQ ID NO: 293, SEQ ID NO: 294, SEQ ID NO: 295, SEQ ID NO: 296, SEQ ID NO: 297, SEQ ID NO: 298, SEQ ID NO: 299, SEQ ID NO: 300, SEQ ID NO: 301, SEQ ID NO: 302, SEQ ID NO: 303, SEQ ID NO: 304, SEQ ID NO: 305, SEQ ID NO: 306, SEQ ID NO: 307, SEQ ID NO: 308, SEQ ID NO: 309, SEQ ID NO: 310, SEQ ID NO: 311, SEQ ID NO: 312, SEQ ID NO: 313, SEQ ID NO: 314, SEQ ID NO: 315, SEQ ID NO: 316, SEQ ID NO: 317, SEQ ID NO: 318, SEQ ID NO: 319, SEQ ID NO: 320, SEQ ID NO: 321, SEQ ID NO: 322, SEQ ID NO: 323, SEQ ID NO: 324, SEQ ID NO: 325, SEQ ID NO: 326, SEQ ID NO: 327, SEQ ID NO: 328, SEQ ID NO: 329, SEQ ID NO: 330, SEQ ID NO: 331, SEQ ID NO: 332, SEQ ID NO: 333, SEQ ID NO: 334, SEQ ID NO: 335, SEQ ID NO: 336, SEQ ID NO: 337, SEQ ID NO: 338, SEQ ID NO: 339, SEQ ID NO: 340, SEQ ID NO: 341, SEQ ID NO: 342, SEQ ID NO: 343, SEQ ID NO: 344, SEQ ID NO: 345, SEQ ID NO: 346, SEQ ID NO: 347, SEQ ID NO: 348, SEQ ID NO: 349, SEQ ID NO: 350, SEQ ID NO: 351, SEQ ID NO: 352, SEQ ID NO: 353, SEQ ID NO: 354, SEQ ID NO: 355, SEQ ID NO: 356, SEQ ID NO: 357, SEQ ID NO: 358, SEQ ID NO: 359, SEQ ID NO: 360, SEQ ID NO: 361, SEQ ID NO: 362, SEQ ID NO: 363, SEQ ID NO: 364, SEQ ID NO: 365, SEQ ID NO: 366, SEQ ID NO: 367, SEQ ID NO: 368, SEQ ID NO: 369, SEQ ID NO: 370, SEQ ID NO: 371, SEQ ID NO: 372, SEQ ID NO: 373, SEQ ID NO: 374, SEQ ID NO: 375, SEQ ID NO: 376, SEQ ID NO: 377, SEQ ID NO: 378, SEQ ID NO: 379, SEQ ID NO: 380, SEQ ID NO: 381, SEQ ID NO: 382, SEQ ID NO: 383, SEQ ID NO: 384, SEQ ID NO: 385, SEQ ID NO: 386, SEQ ID NO: 387, SEQ ID NO: 388, SEQ ID NO: 389, SEQ ID NO: 390, SEQ ID NO: 391, SEQ ID NO: 392, SEQ ID NO: 393, SEQ ID NO: 394, SEQ ID NO: 395, SEQ ID NO: 396, SEQ ID NO: 397, SEQ ID NO: 398, SEQ ID NO: 399, SEQ ID NO: 400, SEQ ID NO: 401, SEQ ID NO: 402, SEQ ID NO: 403, SEQ ID NO: 404, SEQ ID NO: 405, SEQ ID NO: 406, SEQ ID NO: 407, SEQ ID NO: 408, SEQ ID NO: 409, SEQ ID NO: 410, SEQ ID NO: 411, SEQ ID NO: 412, SEQ ID NO: 413, SEQ ID NO: 414, SEQ ID NO: 415, SEQ ID NO: 416, SEQ ID NO: 417, SEQ ID NO: 418, SEQ ID NO: 419, SEQ ID NO: 420, SEQ ID NO: 421, SEQ ID NO: 422, SEQ ID NO: 423, SEQ ID NO: 424, SEQ ID NO: 425, SEQ ID NO: 426, SEQ ID NO: 427, SEQ ID NO: 428, SEQ ID NO: 429, SEQ ID NO: 430, SEQ ID NO: 431, SEQ ID NO: 432, SEQ ID NO: 433, SEQ ID NO: 434, SEQ ID NO: 435, SEQ ID NO: 436, SEQ ID NO: 437, SEQ ID NO: 438, SEQ ID NO: 439, SEQ ID NO: 440, SEQ ID NO: 441, SEQ ID NO: 442, SEQ ID NO: 443, SEQ ID NO: 444, SEQ ID NO: 445, SEQ ID NO: 446, SEQ ID NO: 447, SEQ ID NO: 448, SEQ ID NO: 449, SEQ ID NO: 450, SEQ ID NO: 451, SEQ ID NO: 452, SEQ ID NO: 453, SEQ ID NO: 454, SEQ ID NO: 455, SEQ ID NO: 456, SEQ ID NO: 457, SEQ ID NO: 458, SEQ ID NO: 459, SEQ ID NO: 460, SEQ ID NO: 461, SEQ ID NO: 462, SEQ ID NO: 463, SEQ ID NO: 464, SEQ ID NO: 465, SEQ ID NO: 466, SEQ ID NO: 467, SEQ ID NO: 468, SEQ ID NO: 469, SEQ ID NO: 470, SEQ ID NO: 471, SEQ ID NO: 472, SEQ ID NO: 473, SEQ ID NO: 474, SEQ ID NO: 475, SEQ ID NO: 476, SEQ ID NO: 477, SEQ ID NO: 478, SEQ ID NO: 479, SEQ ID NO: 480, SEQ ID NO: 481, SEQ ID NO: 482, SEQ ID NO: 483, SEQ ID NO: 484, SEQ ID NO: 485, SEQ ID NO: 486, SEQ ID NO: 487, SEQ ID NO: 488, SEQ ID NO: 489, SEQ ID NO: 490, SEQ ID NO: 491, SEQ ID NO: 492, SEQ ID NO: 493, SEQ ID NO: 494, SEQ ID NO: 495, SEQ ID NO: 496, SEQ ID NO: 497, SEQ ID NO: 498, SEQ ID NO: 499, SEQ ID NO: 500, SEQ ID NO: 501, SEQ ID NO: 502, SEQ ID NO: 503, SEQ ID NO: 504, SEQ ID NO: 505, SEQ ID NO: 506, SEQ ID NO: 507, SEQ ID NO: 508, SEQ ID NO: 509, SEQ ID NO: 510, SEQ ID NO: 511, SEQ ID NO: 512, SEQ ID NO: 513, SEQ ID NO: 514, SEQ ID NO: 515, SEQ ID NO: 516, SEQ ID NO: 517, SEQ ID NO: 518, SEQ ID NO: 519, SEQ ID NO: 520, SEQ ID NO: 521, SEQ ID NO: 522, SEQ ID NO: 523, SEQ ID NO: 524, SEQ ID NO: 525, SEQ ID NO: 526, SEQ ID NO: 527, SEQ ID NO: 528, SEQ ID NO: 529, SEQ ID NO: 530, SEQ ID NO: 531, SEQ ID NO: 532, SEQ ID NO: 533, SEQ ID NO: 534, SEQ ID NO: 535, SEQ ID NO: 536, SEQ ID NO: 537, SEQ ID NO: 538, SEQ ID NO: 539, SEQ ID NO: 540, SEQ ID NO: 541, SEQ ID NO: 542, SEQ ID NO: 543, SEQ ID NO: 544, SEQ ID NO: 545, SEQ ID NO: 546, SEQ ID NO: 547, SEQ ID NO: 548, SEQ ID NO: 549, SEQ ID NO: 550, SEQ ID NO: 551, SEQ ID NO: 552, SEQ ID NO: 553, SEQ ID NO: 554, SEQ ID NO: 555, SEQ ID NO: 556, SEQ ID NO: 557, SEQ ID NO: 558, SEQ ID NO: 559, SEQ ID NO: 560, SEQ ID NO: 561, SEQ ID NO: 562, SEQ ID NO: 563, SEQ ID NO: 564, SEQ ID NO: 565, SEQ ID NO: 566, SEQ ID NO: 567, SEQ ID NO: 568, SEQ ID NO: 569, SEQ ID NO: 570, SEQ ID NO: 571, SEQ ID NO: 572, SEQ ID NO: 573, SEQ ID NO: 574, SEQ ID NO: 575, SEQ ID NO: 576, SEQ ID NO: 577, SEQ ID NO: 578, SEQ ID NO: 579, SEQ ID NO: 580, SEQ ID NO: 581, SEQ ID NO: 582, SEQ ID NO: 583, SEQ ID NO: 584, SEQ ID NO: 585, SEQ ID NO: 586, SEQ ID NO: 587, SEQ ID NO: 588, SEQ ID NO: 589, SEQ ID NO: 590, SEQ ID NO: 591, SEQ ID NO: 592, SEQ ID NO: 593, SEQ ID NO: 594, SEQ ID NO: 595, SEQ ID NO: 596, SEQ ID NO: 597, SEQ ID NO: 598, SEQ ID NO: 599, SEQ ID NO: 600, SEQ ID NO: 601, SEQ ID NO: 602, SEQ ID NO: 603, SEQ ID NO: 604, SEQ ID NO: 605, SEQ ID NO: 606, SEQ ID NO: 607, SEQ ID NO: 608, SEQ ID NO: 609, SEQ ID NO: 610, SEQ ID NO: 611, SEQ ID NO: 612, SEQ ID NO: 613, SEQ ID NO: 614, SEQ ID NO: 615, SEQ ID NO: 616, SEQ ID NO: 617, SEQ ID NO: 618, SEQ ID NO: 619, SEQ ID NO: 620, SEQ ID NO: 621, SEQ ID NO: 622, and SEQ ID NO: 623;

[0011] or a complement of said sequence.

[0012] In other embodiments, the present invention provides an isolated polynucleotide consisting of a nucleotide sequence selected from the group consisting of:

[0013] SEQ ID NO: 1, SEQ ID NO: 2, SEQ ID NO: 3, SEQ ID NO: 4, SEQ ID NO: 5, SEQ ID NO: 6, SEQ ID NO: 7, SEQ ID NO: 8, SEQ ID NO: 9, SEQ ID NO: 10, SEQ ID NO: 11, SEQ ID NO: 12, SEQ ID NO: 13, SEQ ID NO: 14, SEQ ID NO: 15, SEQ ID NO: 16. SEQ ID NO: 17, SEQ ID NO: 18, SEQ ID NO: 19, SEQ ID NO: 20, SEQ ID NO: 21, SEQ ID NO: 22, SEQ ID NO: 23, SEQ ID NO: 24, SEQ ID NO: 25, SEQ ID NO: 26, SEQ ID NO: 27, SEQ ID NO: 28, SEQ ID NO: 29, SEQ ID NO: 30, SEQ ID NO: 31, SEQ ID NO: 32, SEQ ID NO: 33, SEQ ID NO: 34, SEQ ID NO: 35, SEQ ID NO: 36, SEQ ID NO: 37, SEQ ID NO: 38, SEQ ID NO: 39, SEQ ID NO: 40, SEQ ID NO: 41, SEQ ID NO: 42, SEQ ID NO: 43, SEQ ID NO: 44, SEQ ID NO: 45, SEQ ID NO: 46, SEQ ID NO: 47, SEQ ID NO: 48, SEQ ID NO: 49, SEQ ID NO: 50, SEQ ID NO: 51, SEQ ID NO: 52, SEQ ID NO: 53, SEQ ID NO: 54, SEQ ID NO: 55, SEQ ID NO: 56, SEQ ID NO: 57, SEQ ID NO: 58, SEQ ID NO: 59, SEQ ID NO: 60, SEQ ID NO: 61, SEQ ID NO: 62, SEQ ID NO: 63, SEQ ID NO: 64, SEQ ID NO: 65, SEQ ID NO: 66, SEQ ID NO: 67, SEQ ID NO: 68, SEQ ID NO: 69, SEQ ID NO: 70, SEQ ID NO: 71, SEQ ID NO: 72, SEQ ID NO: 73, SEQ ID NO: 74, SEQ ID NO: 75, SEQ ID NO: 76, SEQ ID NO: 77, SEQ ID NO: 78, SEQ ID NO: 79, SEQ ID NO: 80, SEQ ID NO: 81, SEQ ID NO: 82, SEQ ID NO: 83, SEQ ID NO: 84, SEQ ID NO: 85, SEQ ID NO: 86, SEQ ID NO: 87, SEQ ID NO: 88, SEQ ID NO: 89, SEQ ID NO: 90, SEQ ID NO: 91, SEQ ID NO: 92, SEQ ID NO: 93, SEQ ID NO: 94, SEQ ID NO: 95, SEQ ID NO: 96, SEQ ID NO: 97, SEQ ID NO: 98, SEQ ID NO: 99, SEQ ID NO: 100, SEQ ID NO: 101, SEQ ID NO: 102, SEQ ID NO: 103, SEQ ID NO: 104, SEQ ID NO: 105, SEQ ID NO: 106, SEQ ID NO: 107, SEQ ID NO: 108, SEQ ID NO: 109, SEQ ID NO: 110, SEQ ID NO: 111, SEQ ID NO: 112, SEQ ID NO: 113, SEQ ID NO: 114, SEQ ID NO: 115, SEQ ID NO: 116, SEQ ID NO: 117, SEQ ID NO: 118, SEQ ID NO: 119, SEQ ID NO: 120, SEQ ID NO: 121, SEQ ID NO: 122, SEQ ID NO: 123, SEQ ID NO: 124, SEQ ID NO: 125, SEQ ID NO: 126, SEQ ID NO: 127, SEQ ID NO: 128, SEQ ID NO: 129, SEQ ID NO: 130, SEQ ID NO: 131, SEQ ID NO: 132, SEQ ID NO: 133, SEQ ID NO: 134, SEQ ID NO: 135, SEQ ID NO: 136, SEQ ID NO: 137, SEQ ID NO: 138, SEQ ID NO: 139, SEQ ID NO: 140, SEQ ID NO: 141, SEQ ID NO: 142, SEQ ID NO: 143, SEQ ID NO: 144, SEQ ID NO: 145, SEQ ID NO: 146, SEQ ID NO: 147, SEQ ID NO: 148, SEQ ID NO: 149, SEQ ID NO: 150, SEQ ID NO: 151, SEQ ID NO: 152, SEQ ID NO: 153, SEQ ID NO: 154, SEQ ID NO: 155, SEQ ID NO: 156, SEQ ID NO: 157, SEQ ID NO: 158, SEQ ID NO: 159, SEQ ID NO: 160, SEQ ID NO: 161, SEQ ID NO: 162, SEQ ID NO: 163, SEQ ID NO: 164, SEQ ID NO: 165, SEQ ID NO: 166, SEQ ID NO: 167, SEQ ID NO: 168, SEQ ID NO: 169, SEQ ID NO: 170, SEQ ID NO: 171, SEQ ID NO: 172, SEQ ID NO: 173, SEQ ID NO: 174, SEQ ID NO: 175, SEQ ID NO: 176, SEQ ID NO: 177, SEQ ID NO: 178, SEQ ID NO: 179, SEQ ID NO: 180, SEQ ID NO: 181, SEQ ID NO: 182, SEQ ID NO: 183, SEQ ID NO: 184, SEQ ID NO: 185, SEQ ID NO: 186, SEQ ID NO: 187, SEQ ID NO: 188, SEQ ID NO: 189, SEQ ID NO: 190, SEQ ID NO: 191, SEQ ID NO: 192, SEQ ID NO: 193, SEQ ID NO: 194, SEQ ID NO: 195, SEQ ID NO: 196, SEQ ID NO: 197, SEQ ID NO: 198, SEQ ID NO: 199, SEQ ID NO: 200, SEQ ID NO: 201, SEQ ID NO: 202, SEQ ID NO: 203, SEQ ID NO: 204, SEQ ID NO: 205, SEQ ID NO: 206, SEQ ID NO: 207, SEQ ID NO: 208, SEQ ID NO: 209, SEQ ID NO: 210, SEQ ID NO: 211, SEQ ID NO: 212, SEQ ID NO: 213, SEQ ID NO: 214, SEQ ID NO: 215, SEQ ID NO: 216, SEQ ID NO: 217, SEQ ID NO: 218, SEQ ID NO: 219, SEQ ID NO: 220, SEQ ID NO: 221, SEQ ID NO: 222, SEQ ID NO: 223, SEQ ID NO: 224, SEQ ID NO: 225, SEQ ID NO: 226, SEQ ID NO: 227, SEQ ID NO: 228, SEQ ID NO: 229, SEQ ID NO: 230, SEQ ID NO: 231, SEQ ID NO: 232, SEQ ID NO: 233, SEQ ID NO: 234, SEQ ID NO: 235, SEQ ID NO: 236, SEQ ID NO: 237, SEQ ID NO: 238, SEQ ID NO: 239, SEQ ID NO: 240, SEQ ID NO: 241, SEQ ID NO: 242, SEQ ID NO: 243, SEQ ID NO: 244, SEQ ID NO: 245, SEQ ID NO: 246, SEQ ID NO: 247, SEQ ID NO: 248, SEQ ID NO: 249, SEQ ID NO: 250, SEQ ID NO: 251, SEQ ID NO: 252, SEQ ID NO: 253, SEQ ID NO: 254, SEQ ID NO: 255, SEQ ID NO: 256, SEQ ID NO: 257, SEQ ID NO: 258, SEQ ID NO: 259, SEQ ID NO: 260, SEQ ID NO: 261, SEQ ID NO: 262, SEQ ID NO: 263, SEQ ID NO: 264, SEQ ID NO: 265, SEQ ID NO: 266, SEQ ID NO: 267, SEQ ID NO: 268, SEQ ID NO: 269, SEQ ID NO: 270, SEQ ID NO: 271, SEQ ID NO: 272, SEQ ID NO: 273, SEQ ID NO: 274, SEQ ID NO: 275, SEQ ID NO: 276, SEQ ID NO: 277, SEQ ID NO: 278, SEQ ID NO: 279, SEQ ID NO: 280, SEQ ID NO: 281, SEQ ID NO: 282, SEQ ID NO: 283, SEQ ID NO: 284, SEQ ID NO: 285, SEQ ID NO: 286, SEQ ID NO: 287, SEQ ID NO: 288, SEQ ID NO: 289, SEQ ID NO: 290, SEQ ID NO: 291, SEQ ID NO: 292, SEQ ID NO: 293, SEQ ID NO: 294, SEQ ID NO: 295, SEQ ID NO: 296, SEQ ID NO: 297, SEQ ID NO: 298, SEQ ID NO: 299, SEQ ID NO: 300, SEQ ID NO: 301, SEQ ID NO: 302, SEQ ID NO: 303, SEQ ID NO: 304, SEQ ID NO: 305, SEQ ID NO: 306, SEQ ID NO: 307, SEQ ID NO: 308, SEQ ID NO: 309, SEQ ID NO: 310, SEQ ID NO: 311, SEQ ID NO: 312, SEQ ID NO: 313, SEQ ID NO: 314, SEQ ID NO: 315, SEQ ID NO: 316, SEQ ID NO: 317, SEQ ID NO: 318, SEQ ID NO: 319, SEQ ID NO: 320, SEQ ID NO: 321, SEQ ID NO: 322, SEQ ID NO: 323, SEQ ID NO: 324, SEQ ID NO: 325, SEQ ID NO: 326, SEQ ID NO: 327, SEQ ID NO: 328, SEQ ID NO: 329, SEQ ID NO: 330, SEQ ID NO: 331, SEQ ID NO: 332, SEQ ID NO: 333, SEQ ID NO: 334, SEQ ID NO: 335, SEQ ID NO: 336, SEQ ID NO: 337, SEQ ID NO: 338, SEQ ID NO: 339, SEQ ID NO: 340, SEQ ID NO: 341, SEQ ID NO: 342, SEQ ID NO: 343, SEQ ID NO: 344, SEQ ID NO: 345, SEQ ID NO: 346, SEQ ID NO: 347, SEQ ID NO: 348, SEQ ID NO: 349, SEQ ID NO: 350, SEQ ID NO: 351, SEQ ID NO: 352, SEQ ID NO: 353, SEQ ID NO: 354, SEQ ID NO: 355, SEQ ID NO: 356, SEQ ID NO: 357, SEQ ID NO: 358, SEQ ID NO: 359, SEQ ID NO: 360, SEQ ID NO: 361, SEQ ID NO: 362, SEQ ID NO: 363, SEQ ID NO: 364, SEQ ID NO: 365, SEQ ID NO: 366, SEQ ID NO: 367, SEQ ID NO: 368, SEQ ID NO: 369, SEQ ID NO: 370, SEQ ID NO: 371, SEQ ID NO: 372, SEQ ID NO: 373, SEQ ID NO: 374, SEQ ID NO: 375, SEQ ID NO: 376, SEQ ID NO: 377, SEQ ID NO: 378, SEQ ID NO: 379, SEQ ID NO: 380, SEQ ID NO: 381, SEQ ID NO: 382, SEQ ID NO: 383, SEQ ID NO: 384, SEQ ID NO: 385, SEQ ID NO: 386, SEQ ID NO: 387, SEQ ID NO: 388, SEQ ID NO: 389, SEQ ID NO: 390, SEQ ID NO: 391, SEQ ID NO: 392, SEQ ID NO: 393, SEQ ID NO: 394, SEQ ID NO: 395, SEQ ID NO: 396, SEQ ID NO: 397, SEQ ID NO: 398, SEQ ID NO: 399, SEQ ID NO: 400, SEQ ID NO: 401, SEQ ID NO: 402, SEQ ID NO: 403, SEQ ID NO: 404, SEQ ID NO: 405, SEQ ID NO: 406, SEQ ID NO: 407, SEQ ID NO: 408, SEQ ID NO: 409, SEQ ID NO: 410, SEQ ID NO: 411, SEQ ID NO: 412, SEQ ID NO: 413, SEQ ID NO: 414, SEQ ID NO: 415, SEQ ID NO: 416, SEQ ID NO: 417, SEQ ID NO: 418, SEQ ID NO: 419, SEQ ID NO: 420, SEQ ID NO: 421, SEQ ID NO: 422, SEQ ID NO: 423, SEQ ID NO: 424, SEQ ID NO: 425, SEQ ID NO: 426, SEQ ID NO: 427, SEQ ID NO: 428, SEQ ID NO: 429, SEQ ID NO: 430, SEQ ID NO: 431, SEQ ID NO: 432, SEQ ID NO: 433, SEQ ID NO: 434, SEQ ID NO: 435, SEQ ID NO: 436, SEQ ID NO: 437, SEQ ID NO: 438, SEQ ID NO: 439, SEQ ID NO: 440, SEQ ID NO: 441, SEQ ID NO: 442, SEQ ID NO: 443, SEQ ID NO: 444, SEQ ID NO: 445, SEQ ID NO: 446, SEQ ID NO: 447, SEQ ID NO: 448, SEQ ID NO: 449, SEQ ID NO: 450, SEQ ID NO: 451, SEQ ID NO: 452, SEQ ID NO: 453, SEQ ID NO: 454, SEQ ID NO: 455, SEQ ID NO: 456, SEQ ID NO: 457, SEQ ID NO: 458, SEQ ID NO: 459, SEQ ID NO: 460, SEQ ID NO: 461, SEQ ID NO: 462, SEQ ID NO: 463, SEQ ID NO: 464, SEQ ID NO: 465, SEQ ID NO: 466, SEQ ID NO: 467, SEQ ID NO: 468, SEQ ID NO: 469, SEQ ID NO: 470, SEQ ID NO: 471, SEQ ID NO: 472, SEQ ID NO: 473, SEQ ID NO: 474, SEQ ID NO: 475, SEQ ID NO: 476, SEQ ID NO: 477, SEQ ID NO: 478, SEQ ID NO: 479, SEQ ID NO: 480, SEQ ID NO: 481, SEQ ID NO: 482, SEQ ID NO: 483, SEQ ID NO: 484, SEQ ID NO: 485, SEQ ID NO: 486, SEQ ID NO: 487, SEQ ID NO: 488, SEQ ID NO: 489, SEQ ID NO: 490, SEQ ID NO: 491, SEQ ID NO: 492, SEQ ID NO: 493, SEQ ID NO: 494, SEQ ID NO: 495, SEQ ID NO: 496, SEQ ID NO: 497, SEQ ID NO: 498, SEQ ID NO: 499, SEQ ID NO: 500, SEQ ID NO: 501, SEQ ID NO: 502, SEQ ID NO: 503, SEQ ID NO: 504, SEQ ID NO: 505, SEQ ID NO: 506, SEQ ID NO: 507, SEQ ID NO: 508, SEQ ID NO: 509, SEQ ID NO: 510, SEQ ID NO: 511, SEQ ID NO: 512, SEQ ID NO: 513, SEQ ID NO: 514, SEQ ID NO: 515, SEQ ID NO: 516, SEQ ID NO: 517, SEQ ID NO: 518, SEQ ID NO: 519, SEQ ID NO: 520, SEQ ID NO: 521, SEQ ID NO: 522, SEQ ID NO: 523, SEQ ID NO: 524, SEQ ID NO: 525, SEQ ID NO: 526, SEQ ID NO: 527, SEQ ID NO: 528, SEQ ID NO: 529, SEQ ID NO: 530, SEQ ID NO: 531, SEQ ID NO: 532, SEQ ID NO: 533, SEQ ID NO: 534, SEQ ID NO: 535, SEQ ID NO: 536, SEQ ID NO: 537, SEQ ID NO: 538, SEQ ID NO: 539, SEQ ID NO: 540, SEQ ID NO: 541, SEQ ID NO: 542, SEQ ID NO: 543, SEQ ID NO: 544, SEQ ID NO: 545, SEQ ID NO: 546, SEQ ID NO: 547, SEQ ID NO: 548, SEQ ID NO: 549, SEQ ID NO: 550, SEQ ID NO: 551, SEQ ID NO: 552, SEQ ID NO: 553, SEQ ID NO: 554, SEQ ID NO: 555, SEQ ID NO: 556, SEQ ID NO: 557, SEQ ID NO: 558, SEQ ID NO: 559, SEQ ID NO: 560, SEQ ID NO: 561, SEQ ID NO: 562, SEQ ID NO: 563, SEQ ID NO: 564, SEQ ID NO: 565, SEQ ID NO: 566, SEQ ID NO: 567, SEQ ID NO: 568, SEQ ID NO: 569, SEQ ID NO: 570, SEQ ID NO: 571, SEQ ID NO: 572, SEQ ID NO: 573, SEQ ID NO: 574, SEQ ID NO: 575, SEQ ID NO: 576, SEQ ID NO: 577, SEQ ID NO: 578, SEQ ID NO: 579, SEQ ID NO: 580, SEQ ID NO: 581, SEQ ID NO: 582, SEQ ID NO: 583, SEQ ID NO: 584, SEQ ID NO: 585, SEQ ID NO: 586, SEQ ID NO: 587, SEQ ID NO: 588, SEQ ID NO: 589, SEQ ID NO: 590, SEQ ID NO: 591, SEQ ID NO: 592, SEQ ID NO: 593, SEQ ID NO: 594, SEQ ID NO: 595, SEQ ID NO: 596, SEQ ID NO: 597, SEQ ID NO: 598, SEQ ID NO: 599, SEQ ID NO: 600, SEQ ID NO: 601, SEQ ID NO: 602, SEQ ID NO: 603, SEQ ID NO: 604, SEQ ID NO: 605, SEQ ID NO: 606, SEQ ID NO: 607, SEQ ID NO: 608, SEQ ID NO: 609, SEQ ID NO: 610, SEQ ID NO: 611, SEQ ID NO: 612, SEQ ID NO: 613, SEQ ID NO: 614, SEQ ID NO: 615, SEQ ID NO: 616, SEQ ID NO: 617, SEQ ID NO: 618, SEQ ID NO: 619, SEQ ID NO: 620, SEQ ID NO: 621, SEQ ID NO: 622, and SEQ ID NO: 623;

[0014] or a complement of said sequence.

[0015] In further embodiments, the present invention provides an isolated polynucleotide consisting essentially of a nucleotide sequence selected from the group consisting of:

[0016] SEQ ID NO: 1, SEQ ID NO: 2, SEQ ID NO: 3, SEQ ID NO: 4, SEQ ID NO: 5, SEQ ID NO: 6, SEQ ID NO: 7, SEQ ID NO: 8, SEQ ID NO: 9, SEQ ID NO: 10, SEQ ID NO: 11, SEQ ID NO: 12, SEQ ID NO: 13, SEQ ID NO: 14, SEQ ID NO: 15, SEQ ID NO: 16, SEQ ID NO: 17, SEQ ID NO: 18, SEQ ID NO: 19, SEQ ID NO: 20, SEQ ID NO: 21, SEQ ID NO: 22, SEQ ID NO: 23, SEQ ID NO: 24, SEQ ID NO: 25, SEQ ID NO: 26, SEQ ID NO: 27, SEQ ID NO: 28, SEQ ID NO: 29, SEQ ID NO: 30, SEQ ID NO: 31, SEQ ID NO: 32, SEQ ID NO: 33, SEQ ID NO: 34, SEQ ID NO: 35, SEQ ID NO: 36, SEQ ID NO: 37, SEQ ID NO: 38, SEQ ID NO: 39, SEQ ID NO: 40, SEQ ID NO: 41, SEQ ID NO: 42, SEQ ID NO: 43, SEQ ID NO: 44, SEQ ID NO: 45, SEQ ID NO: 46, SEQ ID NO: 47, SEQ ID NO: 48, SEQ ID NO: 49, SEQ ID NO: 50, SEQ ID NO: 51, SEQ ID NO: 52, SEQ ID NO: 53, SEQ ID NO: 54, SEQ ID NO: 55, SEQ ID NO: 56, SEQ ID NO: 57, SEQ ID NO: 58, SEQ ID NO: 59, SEQ ID NO: 60, SEQ ID NO: 61, SEQ ID NO: 62, SEQ ID NO: 63, SEQ ID NO: 64, SEQ ID NO: 65, SEQ ID NO: 66, SEQ ID NO: 67, SEQ ID NO: 68, SEQ ID NO: 69, SEQ ID NO: 70, SEQ ID NO: 71, SEQ ID NO: 72, SEQ ID NO: 73, SEQ ID NO: 74, SEQ ID NO: 75, SEQ ID NO: 76, SEQ ID NO: 77, SEQ ID NO: 78, SEQ ID NO: 79, SEQ ID NO: 80, SEQ ID NO: 81, SEQ ID NO: 82, SEQ ID NO: 83, SEQ ID NO: 84, SEQ ID NO: 85, SEQ ID NO: 86, SEQ ID NO: 87, SEQ ID NO: 88, SEQ ID NO: 89, SEQ ID NO: 90, SEQ ID NO: 91, SEQ ID NO: 92, SEQ ID NO: 93, SEQ ID NO: 94, SEQ ID NO: 95, SEQ ID NO: 96, SEQ ID NO: 97, SEQ ID NO: 98, SEQ ID NO: 99, SEQ ID NO: 100, SEQ ID NO: 101, SEQ ID NO: 102, SEQ ID NO: 103, SEQ ID NO: 104, SEQ ID NO: 105, SEQ ID NO: 106, SEQ ID NO: 107, SEQ ID NO: 108, SEQ ID NO: 109, SEQ ID NO: 110, SEQ ID NO: 111, SEQ ID NO: 112, SEQ ID NO: 113, SEQ ID NO: 114, SEQ ID NO: 115, SEQ ID NO: 116, SEQ ID NO: 117, SEQ ID NO: 118, SEQ ID NO: 119, SEQ ID NO: 120, SEQ ID NO: 121, SEQ ID NO: 122, SEQ ID NO: 123, SEQ ID NO: 124, SEQ ID NO: 125, SEQ ID NO: 126, SEQ ID NO: 127, SEQ ID NO: 128, SEQ ID NO: 129, SEQ ID NO: 130, SEQ ID NO: 131, SEQ ID NO: 132, SEQ ID NO: 133, SEQ ID NO: 134, SEQ ID NO: 135, SEQ ID NO: 136, SEQ ID NO: 137, SEQ ID NO: 138, SEQ ID NO: 139, SEQ ID NO: 140, SEQ ID NO: 141, SEQ ID NO: 142, SEQ ID NO: 143, SEQ ID NO: 144, SEQ ID NO: 145, SEQ ID NO: 146, SEQ ID NO: 147, SEQ ID NO: 148, SEQ ID NO: 149, SEQ ID NO: 150, SEQ ID NO: 151, SEQ ID NO: 152, SEQ ID NO: 153, SEQ ID NO: 154, SEQ ID NO: 155, SEQ ID NO: 156, SEQ ID NO: 157, SEQ ID NO: 158, SEQ ID NO: 159, SEQ ID NO: 160, SEQ ID NO: 161, SEQ ID NO: 162, SEQ ID NO: 163, SEQ ID NO: 164, SEQ ID NO: 165, SEQ ID NO: 166, SEQ ID NO: 167, SEQ ID NO: 168, SEQ ID NO: 169, SEQ ID NO: 170, SEQ ID NO: 171, SEQ ID NO: 172, SEQ ID NO: 173, SEQ ID NO: 174, SEQ ID NO: 175, SEQ ID NO: 176, SEQ ID NO: 177, SEQ ID NO: 178, SEQ ID NO: 179, SEQ ID NO: 180, SEQ ID NO: 181, SEQ ID NO: 182, SEQ ID NO: 183, SEQ ID NO: 184, SEQ ID NO: 185, SEQ ID NO: 186, SEQ ID NO: 187, SEQ ID NO: 188, SEQ ID NO: 189, SEQ ID NO: 190, SEQ ID NO: 191, SEQ ID NO: 192, SEQ ID NO: 193, SEQ ID NO: 194, SEQ ID NO: 195, SEQ ID NO: 196, SEQ ID NO: 197, SEQ ID NO: 198, SEQ ID NO: 199, SEQ ID NO: 200, SEQ ID NO: 201, SEQ ID NO: 202, SEQ ID NO: 203, SEQ ID NO: 204, SEQ ID NO: 205, SEQ ID NO: 206, SEQ ID NO: 207, SEQ ID NO: 208, SEQ ID NO: 209, SEQ ID NO: 210, SEQ ID NO: 211, SEQ ID NO: 212, SEQ ID NO: 213, SEQ ID NO: 214, SEQ ID NO: 215, SEQ ID NO: 216, SEQ ID NO: 217, SEQ ID NO: 218, SEQ ID NO: 219, SEQ ID NO: 220, SEQ ID NO: 221, SEQ ID NO: 222, SEQ ID NO: 223, SEQ ID NO: 224, SEQ ID NO: 225, SEQ ID NO: 226, SEQ ID NO: 227, SEQ ID NO: 228, SEQ ID NO: 229, SEQ ID NO: 230, SEQ ID NO: 231, SEQ ID NO: 232, SEQ ID NO: 233, SEQ ID NO: 234, SEQ ID NO: 235, SEQ ID NO: 236, SEQ ID NO: 237, SEQ ID NO: 238, SEQ ID NO: 239, SEQ ID NO: 240, SEQ ID NO: 241, SEQ ID NO: 242, SEQ ID NO: 243, SEQ ID NO: 244, SEQ ID NO: 245, SEQ ID NO: 246, SEQ ID NO: 247, SEQ ID NO: 248, SEQ ID NO: 249, SEQ ID NO: 250, SEQ ID NO: 251, SEQ ID NO: 252, SEQ ID NO: 253, SEQ ID NO: 254, SEQ ID NO: 255, SEQ ID NO: 256, SEQ ID NO: 257, SEQ ID NO: 258, SEQ ID NO: 259, SEQ ID NO: 260, SEQ ID NO: 261, SEQ ID NO: 262, SEQ ID NO: 263, SEQ ID NO: 264, SEQ ID NO: 265, SEQ ID NO: 266, SEQ ID NO: 267, SEQ ID NO: 268, SEQ ID NO: 269, SEQ ID NO: 270, SEQ ID NO: 271, SEQ ID NO: 272, SEQ ID NO: 273, SEQ ID NO: 274, SEQ ID NO: 275, SEQ ID NO: 276, SEQ ID NO: 277, SEQ ID NO: 278, SEQ ID NO: 279, SEQ ID NO: 280, SEQ ID NO: 281, SEQ ID NO: 282, SEQ ID NO: 283, SEQ ID NO: 284, SEQ ID NO: 285, SEQ ID NO: 286, SEQ ID NO: 287, SEQ ID NO: 288, SEQ ID NO: 289, SEQ ID NO: 290, SEQ ID NO: 291, SEQ ID NO: 292, SEQ ID NO: 293, SEQ ID NO: 294, SEQ ID NO: 295, SEQ ID NO: 296, SEQ ID NO: 297, SEQ ID NO: 298, SEQ ID NO: 299, SEQ ID NO: 300, SEQ ID NO: 301, SEQ ID NO: 302, SEQ ID NO: 303, SEQ ID NO: 304, SEQ ID NO: 305, SEQ ID NO: 306, SEQ ID NO: 307, SEQ ID NO: 308, SEQ ID NO: 309, SEQ ID NO: 310, SEQ ID NO: 311, SEQ ID NO: 312, SEQ ID NO: 313, SEQ ID NO: 314, SEQ ID NO: 315, SEQ ID NO: 316, SEQ ID NO: 317, SEQ ID NO: 318, SEQ ID NO: 319, SEQ ID NO: 320, SEQ ID NO: 321, SEQ ID NO: 322, SEQ ID NO: 323, SEQ ID NO: 324, SEQ ID NO: 325, SEQ ID NO: 326, SEQ ID NO: 327, SEQ ID NO: 328, SEQ ID NO: 329, SEQ ID NO: 330, SEQ ID NO: 331, SEQ ID NO: 332, SEQ ID NO: 333, SEQ ID NO: 334, SEQ ID NO: 335, SEQ ID NO: 336, SEQ ID NO: 337, SEQ ID NO: 338, SEQ ID NO: 339, SEQ ID NO: 340, SEQ ID NO: 341, SEQ ID NO: 342, SEQ ID NO: 343, SEQ ID NO: 344, SEQ ID NO: 345, SEQ ID NO: 346, SEQ ID NO: 347, SEQ ID NO: 348, SEQ ID NO: 349, SEQ ID NO: 350, SEQ ID NO: 351, SEQ ID NO: 352, SEQ ID NO: 353, SEQ ID NO: 354, SEQ ID NO: 355, SEQ ID NO: 356, SEQ ID NO: 357, SEQ ID NO: 358, SEQ ID NO: 359, SEQ ID NO: 360, SEQ ID NO: 361, SEQ ID NO: 362, SEQ ID NO: 363, SEQ ID NO: 364, SEQ ID NO: 365, SEQ ID NO: 366, SEQ ID NO: 367, SEQ ID NO: 368, SEQ ID NO: 369, SEQ ID NO: 370, SEQ ID NO: 371, SEQ ID NO: 372, SEQ ID NO: 373, SEQ ID NO: 374, SEQ ID NO: 375, SEQ ID NO: 376, SEQ ID NO: 377, SEQ ID NO: 378, SEQ ID NO: 379, SEQ ID NO: 380, SEQ ID NO: 381, SEQ ID NO: 382, SEQ ID NO: 383, SEQ ID NO: 384, SEQ ID NO: 385, SEQ ID NO: 386, SEQ ID NO: 387, SEQ ID NO: 388, SEQ ID NO: 389, SEQ ID NO: 390, SEQ ID NO: 391, SEQ ID NO: 392, SEQ ID NO: 393, SEQ ID NO: 394, SEQ ID NO: 395, SEQ ID NO: 396, SEQ ID NO: 397, SEQ ID NO: 398, SEQ ID NO: 399, SEQ ID NO: 400, SEQ ID NO: 401, SEQ ID NO: 402, SEQ ID NO: 403, SEQ ID NO: 404, SEQ ID NO: 405, SEQ ID NO: 406, SEQ ID NO: 407, SEQ ID NO: 408, SEQ ID NO: 409, SEQ ID NO: 410, SEQ ID NO: 411, SEQ ID NO: 412, SEQ ID NO: 413, SEQ ID NO: 414, SEQ ID NO: 415, SEQ ID NO: 416, SEQ ID NO: 417, SEQ ID NO: 418, SEQ ID NO: 419, SEQ ID NO: 420, SEQ ID NO: 421, SEQ ID NO: 422, SEQ ID NO: 423, SEQ ID NO: 424, SEQ ID NO: 425, SEQ ID NO: 426, SEQ ID NO: 427, SEQ ID NO: 428, SEQ ID NO: 429, SEQ ID NO: 430, SEQ ID NO: 431, SEQ ID NO: 432, SEQ ID NO: 433, SEQ ID NO: 434, SEQ ID NO: 435, SEQ ID NO: 436, SEQ ID NO: 437, SEQ ID NO: 438, SEQ ID NO: 439, SEQ ID NO: 440, SEQ ID NO: 441, SEQ ID NO: 442, SEQ ID NO: 443, SEQ ID NO: 444, SEQ ID NO: 445, SEQ ID NO: 446, SEQ ID NO: 447, SEQ ID NO: 448, SEQ ID NO: 449, SEQ ID NO: 450, SEQ ID NO: 451, SEQ ID NO: 452, SEQ ID NO: 453, SEQ ID NO: 454, SEQ ID NO: 455, SEQ ID NO: 456, SEQ ID NO: 457, SEQ ID NO: 458, SEQ ID NO: 459, SEQ ID NO: 460, SEQ ID NO: 461, SEQ ID NO: 462, SEQ ID NO: 463, SEQ ID NO: 464, SEQ ID NO: 465, SEQ ID NO: 466, SEQ ID NO: 467, SEQ ID NO: 468, SEQ ID NO: 469, SEQ ID NO: 470, SEQ ID NO: 471, SEQ ID NO: 472, SEQ ID NO: 473, SEQ ID NO: 474, SEQ ID NO: 475, SEQ ID NO: 476, SEQ ID NO: 477, SEQ ID NO: 478, SEQ ID NO: 479, SEQ ID NO: 480, SEQ ID NO: 481, SEQ ID NO: 482, SEQ ID NO: 483, SEQ ID NO: 484, SEQ ID NO: 485, SEQ ID NO: 486, SEQ ID NO: 487, SEQ ID NO: 488, SEQ ID NO: 489, SEQ ID NO: 490, SEQ ID NO: 491, SEQ ID NO: 492, SEQ ID NO: 493, SEQ ID NO: 494, SEQ ID NO: 495, SEQ ID NO: 496, SEQ ID NO: 497, SEQ ID NO: 498, SEQ ID NO: 499, SEQ ID NO: 500, SEQ ID NO: 501, SEQ ID NO: 502, SEQ ID NO: 503, SEQ ID NO: 504, SEQ ID NO: 505, SEQ ID NO: 506, SEQ ID NO: 507, SEQ ID NO: 508, SEQ ID NO: 509, SEQ ID NO: 510, SEQ ID NO: 511, SEQ ID NO: 512, SEQ ID NO: 513, SEQ ID NO: 514, SEQ ID NO: 515, SEQ ID NO: 516, SEQ ID NO: 517, SEQ ID NO: 518, SEQ ID NO: 519, SEQ ID NO: 520, SEQ ID NO: 521, SEQ ID NO: 522, SEQ ID NO: 523, SEQ ID NO: 524, SEQ ID NO: 525, SEQ ID NO: 526, SEQ ID NO: 527, SEQ ID NO: 528, SEQ ID NO: 529, SEQ ID NO: 530, SEQ ID NO: 531, SEQ ID NO: 532, SEQ ID NO: 533, SEQ ID NO: 534, SEQ ID NO: 535, SEQ ID NO: 536, SEQ ID NO: 537, SEQ ID NO: 538, SEQ ID NO: 539, SEQ ID NO: 540, SEQ ID NO: 541, SEQ ID NO: 542, SEQ ID NO: 543, SEQ ID NO: 544, SEQ ID NO: 545, SEQ ID NO: 546, SEQ ID NO: 547, SEQ ID NO: 548, SEQ ID NO: 549, SEQ ID NO: 550, SEQ ID NO: 551, SEQ ID NO: 552, SEQ ID NO: 553, SEQ ID NO: 554, SEQ ID NO: 555, SEQ ID NO: 556, SEQ ID NO: 557, SEQ ID NO: 558, SEQ ID NO: 559, SEQ ID NO: 560, SEQ ID NO: 561, SEQ ID NO: 562, SEQ ID NO: 563, SEQ ID NO: 564, SEQ ID NO: 565, SEQ ID NO: 566, SEQ ID NO: 567, SEQ ID NO: 568, SEQ ID NO: 569, SEQ ID NO: 570, SEQ ID NO: 571, SEQ ID NO: 572, SEQ ID NO: 573, SEQ ID NO: 574, SEQ ID NO: 575, SEQ ID NO: 576, SEQ ID NO: 577, SEQ ID NO: 578, SEQ ID NO: 579, SEQ ID NO: 580, SEQ ID NO: 581, SEQ ID NO: 582, SEQ ID NO: 583, SEQ ID NO: 584, SEQ ID NO: 585, SEQ ID NO: 586, SEQ ID NO: 587, SEQ ID NO: 588, SEQ ID NO: 589, SEQ ID NO: 590, SEQ ID NO: 591, SEQ ID NO: 592, SEQ ID NO: 593, SEQ ID NO: 594, SEQ ID NO: 595, SEQ ID NO: 596, SEQ ID NO: 597, SEQ ID NO: 598, SEQ ID NO: 599, SEQ ID NO: 600, SEQ ID NO: 601, SEQ ID NO: 602, SEQ ID NO: 603, SEQ ID NO: 604, SEQ ID NO: 605, SEQ ID NO: 606, SEQ ID NO: 607, SEQ ID NO: 608, SEQ ID NO: 609, SEQ ID NO: 610, SEQ ID NO: 611, SEQ ID NO: 612, SEQ ID NO: 613, SEQ ID NO: 614, SEQ ID NO: 615, SEQ ID NO: 616, SEQ ID NO: 617, SEQ ID NO: 618, SEQ ID NO: 619, SEQ ID NO: 620, SEQ ID NO: 621, SEQ ID NO: 622, and SEQ ID NO: 623;

[0017] or a complement of said sequence.

[0018] In yet other embodiments, the present invention provides an isolated polynucleotide comprising a nucleotide sequence which hybridizes to a sequence selected from the group consisting of:

[0019] SEQ ID NO: 1, SEQ ID NO: 2, SEQ ID NO: 3, SEQ ID NO: 4, SEQ ID NO: 5, SEQ ID NO: 6, SEQ ID NO: 7, SEQ ID NO: 8, SEQ ID NO: 9, SEQ ID NO: 10, SEQ ID

[0020] NO: 11, SEQ ID NO: 12, SEQ ID NO: 13, SEQ ID NO: 14, SEQ ID NO: 15, SEQ ID NO: 16, SEQ ID NO: 17, SEQ ID NO: 18, SEQ ID NO: 19, SEQ ID NO: 20, SEQ ID NO: 21, SEQ ID NO: 22, SEQ ID NO: 23, SEQ ID NO: 24, SEQ ID NO: 25, SEQ ID NO: 26, SEQ ID NO: 27, SEQ ID NO: 28, SEQ ID NO: 29, SEQ ID NO: 30, SEQ ID NO: 31, SEQ ID NO: 32, SEQ ID NO: 33, SEQ ID NO: 34, SEQ ID NO: 35, SEQ ID NO: 36, SEQ ID NO: 37, SEQ ID NO: 38, SEQ ID NO: 39, SEQ ID NO: 40, SEQ ID NO: 41, SEQ ID NO: 42, SEQ ID NO: 43, SEQ ID NO: 44, SEQ ID NO: 45, SEQ ID NO: 46, SEQ ID NO: 47, SEQ ID NO: 48, SEQ ID NO: 49, SEQ ID NO: 50, SEQ ID NO: 51, SEQ ID NO: 52, SEQ ID NO: 53, SEQ ID NO: 54, SEQ ID NO: 55, SEQ ID NO: 56, SEQ ID NO: 57, SEQ ID NO: 58, SEQ ID NO: 59, SEQ ID NO: 60, SEQ ID NO: 61, SEQ ID NO: 62, SEQ ID NO: 63, SEQ ID NO: 64, SEQ ID NO: 65, SEQ ID NO: 66, SEQ ID NO: 67, SEQ ID NO: 68, SEQ ID NO: 69, SEQ ID NO: 70, SEQ ID NO: 71, SEQ ID NO: 72, SEQ ID NO: 73, SEQ ID NO: 74, SEQ ID NO: 75, SEQ ID NO: 76, SEQ ID NO: 77, SEQ ID NO: 78, SEQ ID NO: 79, SEQ ID NO: 80, SEQ ID NO: 81, SEQ ID NO: 82, SEQ ID NO: 83, SEQ ID NO: 84, SEQ ID NO: 85, SEQ ID NO: 86, SEQ ID NO: 87, SEQ ID NO: 88, SEQ ID NO: 89, SEQ ID NO: 90, SEQ ID NO: 91, SEQ ID NO: 92, SEQ ID NO: 93, SEQ ID NO: 94, SEQ ID NO: 95, SEQ ID NO: 96, SEQ ID NO: 97, SEQ ID NO: 98, SEQ ID NO: 99, SEQ ID NO: 100, SEQ ID NO: 101, SEQ ID NO: 102, SEQ ID NO: 103, SEQ ID NO: 104, SEQ ID NO: 105, SEQ ID NO: 106, SEQ ID NO: 107, SEQ ID NO: 108, SEQ ID NO: 109, SEQ ID NO: 110, SEQ ID NO: 111, SEQ ID NO: 112, SEQ ID NO: 113, SEQ ID NO: 114, SEQ ID NO: 115, SEQ ID NO: 116, SEQ ID NO: 117, SEQ ID NO: 118, SEQ ID NO: 119, SEQ ID NO: 120, SEQ ID NO: 121, SEQ ID NO: 122, SEQ ID NO: 123, SEQ ID NO: 124, SEQ ID NO: 125, SEQ ID NO: 126, SEQ ID NO: 127, SEQ 1D NO: 128, SEQ ID NO: 129, SEQ ID NO: 130, SEQ ID NO: 131, SEQ ID NO: 132, SEQ ID NO: 133, SEQ ID NO: 134, SEQ ID NO: 135, SEQ ID NO: 136, SEQ ID NO: 137, SEQ ID NO: 138, SEQ ID NO: 139, SEQ ID NO: 140, SEQ ID NO: 141, SEQ ID NO: 142, SEQ ID NO: 143, SEQ ID NO: 144, SEQ ID NO: 145, SEQ ID NO: 146, SEQ ID NO: 147, SEQ ID NO: 148, SEQ ID NO: 149, SEQ ID NO: 150, SEQ ID NO: 151, SEQ ID NO: 152, SEQ ID NO: 153, SEQ ID NO: 154, SEQ ID NO: 155, SEQ ID NO: 156, SEQ ID NO: 157, SEQ ID NO: 158, SEQ ID NO: 159, SEQ ID NO: 160, SEQ ID NO: 161, SEQ ID NO: 162, SEQ ID NO: 163, SEQ ID NO: 164, SEQ ID NO: 165, SEQ ID NO: 166, SEQ ID NO: 167, SEQ ID NO: 168, SEQ ID NO: 169, SEQ ID NO: 170, SEQ ID NO: 171, SEQ ID NO: 172, SEQ ID NO: 173, SEQ ID NO: 174, SEQ ID NO: 175, SEQ ID NO: 176, SEQ ID NO: 177, SEQ ID NO: 178, SEQ ID NO: 179, SEQ ID NO: 180, SEQ ID NO: 181, SEQ ID NO: 182, SEQ ID NO: 183, SEQ ID NO: 184, SEQ ID NO: 185, SEQ ID NO: 186, SEQ ID NO: 187, SEQ ID NO: 188, SEQ ID NO: 189, SEQ ID NO: 190, SEQ ID NO: 191, SEQ ID NO: 192, SEQ ID NO: 193, SEQ ID NO: 194, SEQ ID NO: 195, SEQ ID NO: 196, SEQ ID NO: 197, SEQ ID NO: 198, SEQ ID NO: 199, SEQ ID NO: 200, SEQ ID NO: 201, SEQ ID NO: 202, SEQ ID NO: 203, SEQ ID NO: 204, SEQ ID NO: 205, SEQ ID NO: 206, SEQ ID NO: 207, SEQ ID NO: 208, SEQ ID NO: 209, SEQ ID NO: 210, SEQ ID NO: 211, SEQ ID NO: 212, SEQ ID NO: 213, SEQ ID NO: 214, SEQ ID NO: 215, SEQ ID NO: 216, SEQ ID NO: 217, SEQ ID NO: 218, SEQ ID NO: 219, SEQ ID NO: 220, SEQ ID NO: 221, SEQ ID NO: 222, SEQ ID NO: 223, SEQ ID NO: 224, SEQ ID NO: 225, SEQ ID NO: 226, SEQ ID NO: 227, SEQ ID NO: 228, SEQ ID NO: 229, SEQ ID NO: 230, SEQ ID NO: 231, SEQ ID NO: 232, SEQ ID NO: 233, SEQ ID NO: 234, SEQ ID NO: 235, SEQ ID NO: 236, SEQ ID NO: 237, SEQ ID NO: 238, SEQ ID NO: 239, SEQ ID NO: 240, SEQ ID NO: 241, SEQ ID NO: 242, SEQ ID NO: 243, SEQ ID NO: 244, SEQ ID NO: 245, SEQ ID NO: 246, SEQ ID NO: 247, SEQ ID NO: 248, SEQ ID NO: 249, SEQ ID NO: 250, SEQ ID NO: 251, SEQ ID NO: 252, SEQ ID NO: 253, SEQ ID NO: 254, SEQ ID NO: 255, SEQ ID NO: 256, SEQ ID NO: 257, SEQ ID NO: 258, SEQ ID NO: 259, SEQ ID NO: 260, SEQ ID NO: 261, SEQ ID NO: 262, SEQ ID NO: 263, SEQ ID NO: 264, SEQ ID NO: 265, SEQ ID NO: 266, SEQ ID NO: 267, SEQ ID NO: 268, SEQ ID NO: 269, SEQ ID NO: 270, SEQ ID NO: 271, SEQ ID NO: 272, SEQ ID NO: 273, SEQ ID NO: 274, SEQ ID NO: 275, SEQ ID NO: 276, SEQ ID NO: 277, SEQ ID NO: 278, SEQ ID NO: 279, SEQ ID NO: 280, SEQ ID NO: 281, SEQ ID NO: 282, SEQ ID NO: 283, SEQ ID NO: 284, SEQ ID NO: 285, SEQ ID NO: 286, SEQ ID NO: 287, SEQ ID NO: 288, SEQ ID NO: 289, SEQ ID NO: 290, SEQ ID NO: 291, SEQ ID NO: 292, SEQ ID NO: 293, SEQ ID NO: 294, SEQ ID NO: 295, SEQ ID NO: 296, SEQ ID NO: 297, SEQ ID NO: 298, SEQ ID NO: 299, SEQ ID NO: 300, SEQ ID NO: 301, SEQ ID NO: 302, SEQ ID NO: 303, SEQ ID NO: 304, SEQ ID NO: 305, SEQ ID NO: 306, SEQ ID NO: 307, SEQ ID NO: 308, SEQ ID NO: 309, SEQ ID NO: 310, SEQ ID NO: 311, SEQ ID NO: 312, SEQ ID NO: 313, SEQ ID NO: 314, SEQ ID NO: 315, SEQ ID NO: 316, SEQ ID NO: 317, SEQ ID NO: 318, SEQ ID NO: 319, SEQ ID NO: 320, SEQ ID NO: 321, SEQ ID NO: 322, SEQ ID NO: 323, SEQ ID NO: 324, SEQ ID NO: 325 SEQ ID NO: 326, SEQ ID NO: 327, SEQ ID NO: 328, SEQ ID NO: 329, SEQ ID NO: 330, SEQ ID NO: 331, SEQ ID NO: 332, SEQ ID NO: 333, SEQ ID NO: 334, SEQ ID NO: 335, SEQ ID NO: 336, SEQ ID NO: 337, SEQ ID NO: 338, SEQ ID NO: 339, SEQ ID NO: 340, SEQ ID NO: 341, SEQ ID NO: 342, SEQ ID NO: 343, SEQ ID NO: 344, SEQ ID NO: 345, SEQ ID NO: 346, SEQ ID NO: 347, SEQ ID NO: 348, SEQ ID NO: 349, SEQ ID NO: 350, SEQ ID NO: 351, SEQ ID NO: 352, SEQ ID NO: 353, SEQ ID NO: 354, SEQ ID NO: 355, SEQ ID NO: 356, SEQ ID NO: 357, SEQ ID NO: 358, SEQ ID NO: 359, SEQ ID NO: 360, SEQ ID NO: 361, SEQ ID NO: 362, SEQ ID NO: 363, SEQ ID NO: 364, SEQ ID NO: 365, SEQ ID NO: 366, SEQ ID NO: 367, SEQ ID NO: 368, SEQ ID NO: 369, SEQ ID NO: 370, SEQ ID NO: 371, SEQ ID NO: 372, SEQ ID NO: 373: SEQ ID NO: 374, SEQ ID NO: 375, SEQ ID NO: 376, SEQ ID NO: 377, SEQ ID NO: 378, SEQ ID NO: 379, SEQ ID NO: 380, SEQ ID NO: 381, SEQ ID NO: 382, SEQ ID NO: 383, SEQ ID NO: 384, SEQ ID NO: 385, SEQ ID NO: 386, SEQ ID NO: 387, SEQ ID NO: 388, SEQ ID NO: 389, SEQ ID NO: 390, SEQ ID NO: 391, SEQ ID NO: 392, SEQ ID NO: 393, SEQ ID NO: 394, SEQ ID NO: 395, SEQ ID NO: 396, SEQ ID NO: 397, SEQ ID NO: 398, SEQ ID NO: 399, SEQ ID NO: 400, SEQ ID NO: 401, SEQ ID NO: 402, SEQ ID NO: 403, SEQ ID NO: 404, SEQ ID NO: 405, SEQ ID NO: 406, SEQ ID NO: 407, SEQ ID NO: 408, SEQ ID NO: 409, SEQ ID NO: 410, SEQ ID NO: 411, SEQ ID NO: 412, SEQ ID NO: 413, SEQ ID NO: 414, SEQ ID NO: 415, SEQ ID NO: 416, SEQ ID NO: 417, SEQ ID NO: 418, SEQ ID NO: 419, SEQ ID NO: 420, SEQ ID NO: 421, SEQ ID NO: 422, SEQ ID NO: 423, SEQ ID NO: 424, SEQ ID NO: 425, SEQ ID NO: 426, SEQ ID NO: 427, SEQ ID NO: 428, SEQ ID NO: 429, SEQ ID NO: 430, SEQ ID NO: 431, SEQ ID NO: 432, SEQ ID NO: 433, SEQ ID NO: 434, SEQ ID NO: 435, SEQ ID NO: 436, SEQ ID NO: 437, SEQ ID NO: 438, SEQ ID NO: 439, SEQ ID NO: 440, SEQ ID NO: 441, SEQ ID NO: 442, SEQ ID NO: 443, SEQ ID NO: 444, SEQ ID NO: 445, SEQ ID NO: 446, SEQ ID NO: 447, SEQ ID NO: 448, SEQ ID NO: 449, SEQ ID NO: 450, SEQ ID NO: 451, SEQ ID NO: 452, SEQ ID NO: 453, SEQ ID NO: 454, SEQ ID NO: 455, SEQ ID NO: 456, SEQ ID NO: 457, SEQ ID NO: 458, SEQ ID NO: 459, SEQ ID NO: 460, SEQ ID NO: 461, SEQ ID NO: 462, SEQ ID NO: 463, SEQ ID NO: 464, SEQ ID NO: 465, SEQ ID NO: 466, SEQ ID NO: 467, SEQ ID NO: 468, SEQ ID NO: 469, SEQ ID NO: 470, SEQ ID NO: 471, SEQ ID NO: 472, SEQ ID NO: 473, SEQ ID NO: 474, SEQ ID NO: 475, SEQ ID NO: 476, SEQ ID NO: 477, SEQ ID NO: 478, SEQ ID NO: 479, SEQ ID NO: 480, SEQ ID NO: 481, SEQ ID NO: 482, SEQ ID NO: 483, SEQ ID NO: 484, SEQ ID NO: 485, SEQ ID NO: 486, SEQ ID NO: 487, SEQ ID NO: 488, SEQ ID NO: 489, SEQ ID NO: 490, SEQ ID NO: 491, SEQ ID NO: 492, SEQ ID NO: 493, SEQ ID NO: 494, SEQ ID NO: 495, SEQ ID NO: 496, SEQ ID NO: 497, SEQ ID NO: 498, SEQ ID NO: 499, SEQ ID NO: 500, SEQ ID NO: 501, SEQ ID NO: 502, SEQ ID NO: 503, SEQ ID NO: 504, SEQ ID NO: 505, SEQ ID NO: 506, SEQ ID NO: 507, SEQ ID NO: 508, SEQ ID NO: 509, SEQ ID NO: 510, SEQ ID NO: 511, SEQ ID NO: 512, SEQ ID NO: 513, SEQ ID NO: 514, SEQ ID NO: 515, SEQ ID NO: 516, SEQ ID NO: 517, SEQ ID NO: 518, SEQ ID NO: 519, SEQ ID NO: 520, SEQ ID NO: 521, SEQ ID NO: 522, SEQ ID NO: 523, SEQ ID NO: 524, SEQ ID NO: 525, SEQ ID NO: 526, SEQ ID NO: 527, SEQ ID NO: 528, SEQ ID NO: 529, SEQ ID NO: 530, SEQ ID NO: 531, SEQ ID NO: 532, SEQ ID NO: 533, SEQ ID NO: 534, SEQ ID NO: 535, SEQ ID NO: 536, SEQ ID NO: 537, SEQ ID NO: 538, SEQ ID NO: 539, SEQ ID NO: 540, SEQ ID NO: 541, SEQ ID NO: 542, SEQ ID NO: 543, SEQ ID NO: 544, SEQ ID NO: 545, SEQ ID NO: 546, SEQ ID NO: 547, SEQ ID NO: 548, SEQ ID NO: 549, SEQ ID NO: 550, SEQ ID NO: 551, SEQ ID NO: 552, SEQ ID NO: 553, SEQ ID NO: 554, SEQ ID NO: 555, SEQ ID NO: 556, SEQ ID NO: 557, SEQ ID NO: 558, SEQ ID NO: 559, SEQ ID NO: 560, SEQ ID NO: 561, SEQ ID NO: 562, SEQ ID NO: 563, SEQ ID NO: 564, SEQ ID NO: 565, SEQ ID NO: 566, SEQ ID NO: 567, SEQ ID NO: 568, SEQ ID NO: 569, SEQ ID NO: 570, SEQ ID NO: 571, SEQ ID NO: 572, SEQ ID NO: 573, SEQ ID NO: 574, SEQ ID NO: 575, SEQ ID NO: 576, SEQ ID NO: 577, SEQ ID NO: 578, SEQ ID NO: 579, SEQ ID NO: 580, SEQ ID NO: 581, SEQ ID NO: 582, SEQ ID NO: 583, SEQ ID NO: 584, SEQ ID NO: 585, SEQ ID NO: 586, SEQ ID NO: 587, SEQ ID NO: 588, SEQ ID NO: 589, SEQ ID NO: 590, SEQ ID NO: 591, SEQ ID NO: 592, SEQ ID NO: 593, SEQ ID NO: 594, SEQ ID NO: 595, SEQ ID NO: 596, SEQ ID NO: 597, SEQ ID NO: 598, SEQ ID NO: 599, SEQ ID NO: 600, SEQ ID NO: 601, SEQ ID NO: 602, SEQ ID NO: 603, SEQ ID NO: 604, SEQ ID NO: 605, SEQ ID NO: 606, SEQ ID NO: 607, SEQ ID NO: 608, SEQ ID NO: 609, SEQ ID NO: 610, SEQ ID NO: 611, SEQ ID NO: 612, SEQ ID NO: 613, SEQ ID NO: 614, SEQ ID NO: 615, SEQ ID NO: 616, SEQ ID NO: 617, SEQ ID NO: 618, SEQ ID NO: 619, SEQ ID NO: 620, SEQ ID NO: 621, SEQ ID NO: 622, and SEQ ID NO: 623;

[0021] or to a complement of said sequence.

[0022] The invention also provides for proteins encoded by the above-described polynucleotides. In certain preferred embodiments, the polynucleotide is operably linked to an expression control sequence. The invention also provides a host cell, including bacterial, yeast, insect and mammalian cells, transformed with such polynucleotide compositions. Also provided by the present invention are organisms that have enhanced, reduced, or modified expression of the gene(s) corresponding to the polynucleotide sequences disclosed herein.

[0023] Processes are also provided for producing a protein, which comprise:

[0024] (a) growing a culture of the host cell transformed with such polynucleotide compositions in a suitable culture medium; and

[0025] (b) purifying the protein from the culture. The protein produced according to such methods is also provided by the present invention.

[0026] Protein compositions of the present invention may further comprise a pharmaceutically acceptable carrier. Compositions comprising an antibody which specifically reacts with such protein are also provided by the present invention.

[0027] Methods are also provided for preventing, treating or ameliorating a medical condition which comprises administering to a mammalian subject a therapeutically effective amount of a composition comprising a protein of the present invention, and/or a polynucleotide of the present invention, and a pharmaceutically acceptable carrier.

### DETAILED DESCRIPTION

[0028] The nucleotide sequences of the isolated cDNAs of the present invention are reported in the Sequence Listing below. Table 2 lists the “Clone ID Nos.” assigned by applicants to each SEQ ID NO: in the Sequence Listing.

TABLE 2
Each pair of entries in this table consists of
the SEQ ID NO (e.g., 1, 2, etc.) followed by the
Clone ID No. for such sequence (e.g., AA351_2,
AA351_6, etc.).

| | |
|---|---|
| 1 | AA351_2 |
| 2 | AA351_6 |
| 3 | AA36_21 |
| 4 | AC423_6 |
| 5 | AJ180_4 |
| 6 | AJ180_5 |
| 7 | AJ1_{—1} |
| 8 | AJ53_4 |
| 9 | AK296_1is |
| 10 | AM1O17_21 |
| 11 | AM1083_14 |
| 12 | AM224_1 |
| 13 | AM340_11 |
| 14 | AM931_1is |
| 15 | AP224_2s |
| 16 | AP226_21 |
| 17 | AP259_1w |
| 18 | AR325_2 |
| 19 | AR399_3 |
| 20 | AR440_1 |
| 21 | AS18O_1 |
| 22 | AS23_1 |
| 23 | AS63_26 |
| 24 | AS63_29 |
| 25 | AT211_1 |
| 26 | AT211_17 |
| 27 | AT340_23 |
| 28 | AU106_1 |
| 29 | AU107_1 |
| 30 | AU118_1 |
| 31 | AW92_1 |
| 32 | AW92_1s |
| 33 | AX17_1 |
| 34 | AX34_1 |
| 35 | AX34_3 |
| 36 | B224_1 |
| 37 | BA91_3 |
| 38 | BD176_3 |
| 39 | BD316_2 |
| 40 | BD486_3 |
| 41 | BD579_1w |
| 42 | BF245_1 |
| 43 | BG219_2 |
| 44 | BG241_1 |
| 45 | BG457_1 |
| 46 | BG72_1 |
| 47 | BI165_12 |
| 48 | BK518_1w |
| 49 | BL196_22 |
| 50 | BL229_22 |
| 51 | BL249_18 |
| 52 | BL255_1 |
| 53 | BM41_3s |
| 54 | BN189_1 |
| 55 | BN189_18 |
| 56 | BO432_1 |
| 57 | BO432_4 |
| 58 | BO538_2 |
| 59 | BO549_1 |
| 60 | BO71_1 |
| 61 | BPI75_3 |
| 62 | BP813_3 |
| 63 | BR595_4 |
| 64 | BR595_5 |
| 65 | BS81_2 |
| 66 | BS81_2s |
| 67 | BV239_3 |
| 68 | BV286_1 |
| 69 | BV369_1w |
| 70 | BV370_1w |
| 71 | BV5_1 |
| 72 | BZ16_3 |
| 73 | BZ16_7 |
| 74 | BZ53_1 |
| 75 | BZ644_34 |
| 76 | CA1O6_19xs |
| 77 | CB98_4s |
| 78 | CC194_4 |
| 79 | CC288_9 |
| 80 | CC346_1 |
| 81 | CC403_3 |
| 82 | CC412_1w |
| 83 | CC413_1w |
| 84 | CG158_1 |
| 85 | CG432_1 |
| 86 | CG432_2 |
| 87 | CG432_3 |
| 88 | CI247_3 |
| 89 | CJ24_10 |
| 90 | CJ397_1 |
| 91 | CJ84_3 |
| 92 | CN1004_1w |
| 93 | CN173_1 |
| 94 | CN238_1s |
| 95 | CO1256_1w |
| 96 | CO71_1 |
| 97 | CO908_1 |
| 98 | CO908_41 |
| 99 | CR1155_1 |
| 100 | CR491_1 |
| 101 | CT636_1 |
| 102 | CT702_8 |
| 103 | CW675_3 |
| 104 | CW691_11s |
| 105 | CZ770_1 |
| 106 | CZ770_7 |
| 107 | D329_1 |
| 108 | D68_2 |
| 109 | DA136_11 |
| 110 | DA136_33 |
| 111 | DA348_5 |
| 112 | DA451_1 |
| 113 | DA451_2 |
| 114 | DD352_1 |
| 115 | DD413_3 |
| 116 | DE121_1w |
| 117 | DE122_1w |
| 118 | DF780_11 |
| 119 | DF835_1 |
| 120 | DH1349_1 |
| 121 | DH1361_1w |
| 122 | D1362_3 |
| 123 | D1366_3 |
| 124 | D1448_11 |
| 125 | DK230_12 |
| 126 | DK329_16 |
| 127 | DK70_15 |
| 128 | DN153_8 |
| 129 | DN714_2 |
| 130 | DN721_8s |
| 131 | DN732_1 |
| 132 | DU160_15 |
| 133 | DU238_1 |
| 134 | DU238_1s |
| 135 | DU416_1 |
| 136 | DU416_11 |
| 137 | DU416_2 |
| 138 | DW1013_1w |
| 139 | DX153_7 |
| 140 | EC428_2 |
| 141 | EE242_1w |
| 142 | EH12_12 |
| 143 | EI16_13 |
| 144 | EI16_13s |
| 145 | EI250_1 |
| 146 | EJ254_1 |
| 147 | ELl5_14 |
| 148 | EM446_1w |
| 149 | EN256_11 |
| 150 | EN37_1 |
| 151 | ET84_1 |
| 152 | EZ265_1w |
| 153 | FG372_41 |
| 154 | FG966_1w |
| 155 | FH6_12 |
| 156 | FJ283_11s |
| 157 | FS185_1w |
| 158 | FX127_21 |
| 159 | FX541_1w |
| 160 | FY356_14 |
| 161 | FY641_1w |
| 162 | FZ87_2 |
| 163 | G55_1 |
| 164 | GE553_1w |
| 165 | GE554_1w |
| 166 | GX619_8 |
| 167 | GX760_23 |
| 168 | GY622_1w |
| 169 | H298_23 |
| 170 | H541_3is |
| 171 | HC986_1 |
| 172 | HZ162_4 |
| 173 | 1G35_12 |
| 174 | IJ1442_3 |
| 175 | IK644_1w |
| 176 | IS114_1 |
| 177 | J143_1 |
| 178 | J218_15 |
| 179 | K289_4 |
| 180 | K421_1x |
| 181 | K446_3 |
| 182 | K511_1is |
| 183 | KJ921_1w |
| 184 | KM14_4 |
| 185 | KZ316_1w |
| 186 | LF307_5 |
| 187 | LR607_12 |
| 188 | LT390_9 |
| 189 | LT403_2 |
| 190 | LT706_1w |
| 191 | LU524_2 |
| 192 | M141_1 |
| 193 | MA278_1w |
| 194 | MD312_1 |
| 195 | ME514_7 |
| 196 | ME796_1 |
| 197 | ML227_1 |
| 198 | MM197_1 |
| 199 | MM367_6 |
| 200 | MN341_2 |
| 201 | MR315_1w |
| 202 | NA1142_2 |
| 203 | NB31_13s |
| 204 | NF61_3 |
| 205 | NH369_4 |
| 206 | NH455_6 |
| 207 | NM19O_1 |
| 208 | NN131_1 |
| 209 | NN93_1 |
| 210 | NN93_5 |
| 211 | NS121_9 |
| 212 | NU232_3 |
| 213 | NZ149_4 |
| 214 | O117_1 |
| 215 | OL1_1x |
| 216 | OM1_1x |
| 217 | ON1_1x |
| 218 | ON2_1x |
| 219 | ON3_1x |
| 220 | OP1_1x |
| 221 | OR1_1 |
| 222 | OR2_1 |
| 223 | OR4_1 |
| 224 | OR5_1 |
| 225 | OR6_1 |
| 226 | OS1_1 |
| 227 | PE246_4 |
| 228 | PE567_1 |
| 229 | PG284_1 |
| 230 | PI13_1 |
| 231 | PI13_10 |
| 232 | PI13_5 |
| 233 | PI198_3 |
| 234 | PJ11_2 |
| 235 | PJ142_10 |
| 236 | PJ299_3 |
| 237 | PKl03_10 |
| 238 | PK175_1 |
| 239 | PK185_37 |
| 240 | PK198_8 |
| 241 | PK224_1 |
| 242 | PK224_11 |
| 243 | PK224_12 |
| 244 | PK224_9 |
| 245 | PK259_5 |
| 246 | PK266_4s |
| 247 | PK405_1 |
| 248 | PK558_1 |
| 249 | PK65_1 |
| 250 | PL16_12 |
| 251 | PL211_2 |
| 252 | PL251_1 |
| 253 | PL33_4 |
| 254 | PL360_9 |
| 255 | PL5O1_5 |
| 256 | PL566_1s |
| 257 | PL772_2 |
| 258 | PL85_3 |
| 259 | PM303_10 |
| 260 | PM347_4s |
| 261 | PM362_2 |
| 262 | PM385_6 |
| 263 | PM404_2 |
| 264 | PM43_3 |
| 265 | PM4_13s |
| 266 | PM696_10 |
| 267 | PP173_1 |
| 268 | PP297_2 |
| 269 | PP314_19 |
| 270 | PP345_3 |
| 271 | PP411_1 |
| 272 | PP509_3 |
| 273 | PT11_8 |
| 274 | PT215_3s |
| 275 | PT217_3 |
| 276 | PT285_20 |
| 277 | PT3O1_6 |
| 278 | PT330_14 |
| 279 | PT3_11 |
| 280 | PT364_2 |
| 281 | PU234_2 |
| 282 | PU26_1 |
| 283 | PU26_3 |
| 284 | PV138_2 |
| 285 | PV323_2 |
| 286 | PV549_2 |
| 287 | PW102_9 |
| 288 | PW123_7 |
| 289 | PW214_{—15s} |
| 290 | PW245_1 |
| 291 | PW328_4 |
| 292 | PW378_2 |
| 293 | PW429_13 |
| 294 | PW447_2 |
| 295 | PW471_2 |
| 296 | PX202_14 |
| 297 | Q691_4x |
| 298 | QB216_2 |
| 299 | QB282_1 |
| 300 | QC337_1 |
| 301 | QC488_1 |
| 302 | QC525_1 |
| 303 | QF17_1 |
| 304 | QF241_1 |
| 305 | QF2_1 |
| 306 | QF320_1 |
| 307 | QF464_7 |
| 308 | QG373_2 |
| 309 | QG537_4 |
| 310 | QG591_2 |
| 311 | QM22_2 |
| 312 | QU332_1 |
| 313 | QV257_1 |
| 314 | QV326_3 |
| 315 | QV349_4 |
| 316 | QV378_2 |
| 317 | QX338_20 |
| 318 | QY1263_1 |
| 319 | QY1352_1 |
| 320 | QY1756_4 |
| 321 | QY356_1 |
| 322 | QY385_10 |
| 323 | RA726_2 |
| 324 | RB342_3 |
| 325 | RB535_1 |
| 326 | RB771_6 |
| 327 | RB778_5 |
| 328 | RB792_14 |
| 329 | RD1058_2 |
| 330 | RD1111_2 |
| 331 | RD207_1 |
| 332 | RD309_2 |
| 333 | RD616_11 |
| 334 | RD62_4 |
| 335 | RD959_3 |
| 336 | RG452_1 |
| 337 | RG661_1 |
| 338 | RJ118_2 |
| 339 | RJ402_4 |
| 340 | RJ7_1 |
| 341 | RJ898_1 |
| 342 | RJ900_18 |
| 343 | WA153_2 |
| 344 | WA545_8 |
| 345 | WA628_2 |
| 346 | WA628_5 |
| 347 | WG67_19 |
| 348 | YD121_1 |
| 349 | YD122_1 |
| 350 | YA18_1 |
| 351 | YA25_1 |
| 352 | YA26_1 |
| 353 | YA3O_1 |
| 354 | YA31_1 |
| 355 | YA33_1 |
| 356 | YA34_1 |
| 357 | YA36_1 |
| 358 | YA37_1 |
| 359 | YA39_1 |
| 360 | YA_1 |
| 361 | YA40_1 |
| 362 | YA45_1 |
| 363 | YA46_1 |
| 364 | YA47_1 |
| 365 | YA48_1 |
| 366 | YA50_1 |
| 367 | YA51_1 |
| 368 | YA52_1 |
| 369 | YAS3_1 |
| 370 | YA5_1 |
| 371 | YA56_1 |
| 372 | YA57_1 |
| 373 | YA58_1 |
| 374 | YA59_1 |
| 375 | YA5_1 |
| 376 | YA6O_1 |
| 377 | YA61_1 |
| 378 | YA62_1 |
| 379 | YA63_1 |
| 380 | YA64_1 |
| 381 | YA68_1 |
| 382 | YA71_1 |
| 383 | YA72_1 |
| 384 | YA73_1 |
| 385 | YA74_1 |
| 386 | YA76_1 |
| 387 | YA78_1 |
| 388 | YA79_1 |
| 389 | YA81_1 |
| 390 | YA82_1 |
| 391 | YA83_1 |
| 392 | YA84_1 |
| 393 | YA85_1 |
| 394 | YA8_1 |
| 395 | YAA1_1 |
| 396 | YAA2_1 |
| 397 | YAA3_1 |
| 398 | YB100_1 |
| 399 | YB102_1 |
| 400 | YB103_1 |
| 401 | YB104_1 |
| 402 | YB1O5_1 |
| 403 | YB106_1 |
| 404 | YB107_1 |
| 405 | YB1O8_1 |
| 406 | YB1O9_1 |
| 407 | YB10_1 |
| 408 | YB110_1 |
| 409 | YB111_1 |
| 410 | YB112_1 |
| 411 | YB113_1 |
| 412 | YB114_1 |
| 413 | YB11S_1 |
| 414 | YB116_1 |
| 415 | YB118_1 |
| 416 | YB119_1 |
| 417 | YB12O_1 |
| 418 | YB121_1 |
| 419 | YB122_1 |
| 420 | YB123_1 |
| 421 | YB126_1 |
| 422 | YB127_1 |
| 423 | YB128_1 |
| 424 | YB129_1 |
| 425 | YB13O_1 |
| 426 | YB131_1 |
| 427 | YB132_1 |
| 428 | YB133_1 |
| 429 | YB134_1 |
| 430 | YB135_1 |
| 431 | YB136_1 |
| 432 | YB137_1 |
| 433 | YB138_1 |
| 434 | YB140_1 |
| 435 | YB141_1 |
| 436 | YB142_1 |
| 437 | YB143_1 |
| 438 | YB144_1 |
| 439 | YB146_1 |
| 440 | YB147_1 |
| 441 | YB148_1 |
| 442 | YB149_1 |
| 443 | YB14_1 |
| 444 | YB151_1 |
| 445 | YB152_1 |
| 446 | YB153_1 |
| 447 | YB154_1 |
| 448 | YB155_1 |
| 449 | YB156_1 |
| 450 | YB157_1 |
| 451 | YB158_1 |
| 452 | YB159_1 |
| 453 | YB160_1 |
| 454 | YB161_1 |
| 455 | YB162_1 |
| 456 | YB163_1 |
| 457 | YB165_1 |
| 458 | YB166_1 |
| 459 | YB167_1 |
| 460 | YB168_1 |
| 461 | YB169_1 |
| 462 | YB16_1 |
| 463 | YB17O_1 |
| 464 | YB17l_1 |
| 465 | YB172_1 |
| 466 | YB173_1 |
| 467 | YB174_1 |
| 468 | YB175_1 |
| 469 | YB176_1 |
| 470 | YB177_1 |
| 471 | YB178_1 |
| 472 | YB17_1 |
| 473 | YB18O_1 |
| 474 | YB181_1 |
| 475 | YB182_1 |
| 476 | YB184_1 |
| 477 | YB185_1 |
| 478 | YB186_2s |
| 479 | YB188_1 |
| 480 | YB189_1 |
| 481 | YB18_1 |
| 482 | YB19O_1 |
| 483 | YB191_1 |
| 484 | YB194_1 |
| 485 | YB195_1 |
| 486 | YB198_1 |
| 487 | YB199_1 |
| 488 | YB1_1 |
| 489 | YB200_1 |
| 490 | YB2O1_1 |
| 491 | YB202_1 |
| 492 | YB203_1 |
| 493 | YB205_1 |
| 494 | YB206_1 |
| 495 | YB207_1 |
| 496 | YB208_1 |
| 497 | YB209_1 |
| 498 | YB2O_1 |
| 499 | YB210_1 |
| 500 | YB211_1 |
| 501 | YB212_1 |
| 502 | YB213_1 |
| 503 | YB214_1 |
| 504 | YB216_1 |
| 505 | YB217_1 |
| 506 | YB218_1 |
| 507 | YB220_1 |
| 508 | YB221_1 |
| 509 | YB223_1 |
| 510 | YB224_1 |
| 511 | YB225_1 |
| 512 | YB227_1 |
| 513 | YB229_1 |
| 514 | YB230_1 |
| 515 | YB231_1 |
| 516 | YB232_1 |
| 517 | YB234_1 |
| 518 | YB236_1 |
| 519 | YB237_1 |
| 520 | YB238_1 |
| 521 | YB241_1 |
| 522 | YB242_1 |
| 523 | YB243_1 |
| 524 | YB244_1 |
| 525 | YB245_1 |
| 526 | YB246_1 |
| 527 | YB248_1 |
| 528 | YB254_1 |
| 529 | YB26_1 |
| 530 | YB261_1 |
| 531 | YB27_1 |
| 532 | YB32_1 |
| 533 | YB41_1 |
| 534 | YB45_1 |
| 535 | YB46_1 |
| 536 | YB48_1 |
| 537 | YB4_1 |
| 538 | YB5O_1 |
| 539 | YB52_1 |
| 540 | YB53_1 |
| 541 | YB55_1 |
| 542 | YB59_1 |
| 543 | YB61_1 |
| 544 | YB65_1 |
| 545 | YB67_1 |
| 546 | YB68_1 |
| 547 | YB6_1 |
| 548 | YB75_1 |
| 549 | YB75_11 |
| 550 | YB78_1 |
| 551 | YB83_1 |
| 552 | YB86_1 |
| 553 | YB87_1 |
| 554 | YB92_1 |
| 555 | YB93_1 |
| 556 | YB94_1 |
| 557 | YB95_1 |
| 558 | YB96_1 |
| 509 | YB97_1 |
| 560 | YB98_1 |
| 561 | YB99_1 |
| 562 | YB9_1 |
| 563 | YBA1_1 |
| 564 | YBA2_1 |
| 565 | YC12_1 |
| 566 | YC16_1 |
| 567 | YC1_1 |
| 568 | YC21_1 |
| 569 | YC22_1 |
| 570 | YC30_1 |
| 571 | YC31_1 |
| 572 | YC32_1 |
| 573 | YC33_1 |
| 574 | YC35_1 |
| 575 | YC36_1 |
| 576 | YC37_1 |
| 577 | YC38_1 |
| 578 | YC39_1 |
| 579 | YC3_1 |
| 580 | YC41_1 |
| 581 | YC42_1 |
| 582 | YC43_1 |
| 583 | YC4_1 |
| 584 | YC45_1 |
| 585 | YC46_1 |
| 586 | YC47_1 |
| 587 | YC50_1 |
| 588 | YC52_1 |
| 589 | YC52_1 |
| 590 | YC54_1 |
| 591 | YC55_1 |
| 592 | YC56_1 |
| 593 | YCS7_1 |
| 594 | YC58_1 |
| 595 | YC59_1 |
| 596 | YC5_1 |
| 597 | YC61_1 |
| 598 | YC62_1 |
| 599 | YC63_1 |
| 600 | YC64_1 |
| 601 | YCA1_1 |
| 602 | YCA2_1 |
| 603 | YCA3_1 |
| 604 | YCA4_1 |
| 605 | YD100_1 |
| 606 | YD1O1_1 |
| 607 | YD1O2_1 |
| 608 | YD104_1 |
| 609 | YD1O5_1 |
| 610 | YD1O6_1 |
| 611 | YD1O8_1 |
| 612 | YD11O_1 |
| 613 | YD111_1 |
| 614 | YD112_1 |
| 615 | YD113_1 |
| 616 | YD114_1 |
| 617 | YD115_1 |
| 618 | YD116_1 |
| 619 | YD117_1 |
| 620 | YD118_1 |
| 621 | YD119_1 |
| 622 | YD11_1 |
| 623 | YD12O_1 |

[0029] The “Clone ID No.” for a particular clone consists of one or two letters followed by a number. The letters designate the tissue source from which the sEST for that clone was initially isolated. Table 3 below lists the various sources which were run through applicants' signal sequence trap.

TABLE 3

| Sel. | Species | Stage | Tissue | Cell Type | Treatment |
|---|---|---|---|---|---|
| AA | Human | Fetal | Kidney | 19-23wks., M/F pool of 5 | None |
| AC | Human | Fetal | Placenta | 26yrs., 1 specimen | None |
| AJ | Human | Adult | Testes | 10-61yrs., pool of 11 | None |
| AK | Human | Fetal | Kidney | 19-23wks., M/F pool of 5 | None |
| AM | Human | Fetal | Kidney | 19-23wks., M/F pool of 5 | None |
| AP | Human | Fetal | Placenta | 26yrs., 1 specimen | None |
| AR | Human | Adult | Retina | 16-75yrs., pool of 76 | None |
| AS | Human | Fetal | Brain | 19-23wks., M/F pool of 5 | None |
| AT | Human | Adult | Blood | Lymphocytes + Dendritic Cells | MLR |
| AU | Human | Adult | Testes | 10-61yrs., pool of 11 | None |
| AW | Human | Adult | Ovary | PA-1 Teratocarcinoma line | RA + activin |
| AX | Human | Adult | Testes | 10-61yrs., pool of 11 | None |
| B | Human | Adult | Blood | PBMC | ConA + PMA |
| BA | Human | Fetal | Placenta | 26yrs., 1 specimen | None |
| BD | Human | Fetal | Kidney | 19-23wks., M/F pool of 5 | None |
| BF | Human | Fetal | Brain | 19-23wks., M/F pool of 5 | None |
| BG | Human | Adult | Brain | N/A | None |
| BI | Human | Fetal | Kidney | 19-23wks., M/F pool of 5 | None |
| BK | Human | Adult | Retina | 16-75yrs., pool of 76 | None |
| BL | Human | Adult | Testes | 10-61yrs., pool of 11 | None |
| BM | Human | Adult | Muscle | N/A | None |
| BN | Human | Fetal | Placenta | 26yrs., 1 specimen | None |
| BO | Human | Adult | Retina | 16-75yrs., pool of 76 | None |
| BP | Human | Fetal | Kidney | 19-23wks., M/F pool of 5 | None |
| BR | Human | Fetal | Kidney | 19-23wks., M/F pool of 5 | None |
| BS | Human | Adult | Pituitary | N/A | None |
| BV | Human | Adult | Brain | N/A | None |
| BZ | Human | Fetal | Kidney | 19-23wks., M/F pool of 5 | None |
| CA | Mouse | Fetal | Embryo | ES line embryoid bodies | 2-12d post LIF |
| CB | Human | Fetal | Brain | 19-23wks., M/F pool of 5 | None |
| CC | Human | Adult | Brain | N/A | None |
| CC | Human | Adult | Testes | 10-61yrs., pool of 11 | None |
| CI | Human | Adult | Brain | N/A | None |
| CJ | Human | Fetal | Brain | 19-23wks., M/F pool of 5 | None |
| CN | Human | Fetal | Brain | 19-23wks., M/F pool of 5 | None |
| CO | Human | Adult | Brain | N/A | None |
| CR | Human | Adult | Testes | 10-61yrs., pool of 11 | None |
| CT | Human | Adult | Brain | N/A | None |
| CW | Human | Fetal | Brain | 19-23wks., M/F pool of 5 | None |
| CZ | Human | Adult | Testes | 10-61yrs., pool of 11 | None |
| D | Human | Adult | Blood | PBMC | ConA + PMA |
| DA | Human | Fetal | Placenta | 26yrs., 1 specimen | None |
| DD | Human | Adult | Testes | 10-61yrs., pool of 11 | None |
| DE | Human | Adult | Testes | Teratocarcinoma NCCIT line | None |
| DF | Human | Adult | Brain | N/A | None |
| DH | Human | Fetal | Brain | 19-23wks., M/F pool of 5 | None |
| DI | Human | Adult | Testes | 10-61yrs., pool of 11 | None |
| DK | Human | Fetal | Kidney | N/A | None |
| DN | Human | Fetal | Brain | 19-23wks., M/F pool of 5 | None |
| DU | Human | Fetal | Brain | 19-23wks., M/F pool of 5 | None |
| DW | Human | Adult | Brain | N/A | None |
| DX | Human | Adult | Testes | 10-61yrs., pool of 11 | None |
| EC | Human | Adult | Brain | N/A | None |
| EE | Human | Adult | Testes | 10-61yrs., pool of 11 | None |
| EH | Human | Adult | Blood | PBMC | C-CSF in vivo |
| EI | Human | Fetal | Brain | 19-23wks., M/F pool of 5 | None |
| EJ | Human | Fetal | Placenta | 26yrs., 1 specimen | None |
| EL | Human | Adult | Testes | 10-61yrs., pool of 11 | None |
| EM | Human | Fetal | Kidney | N/A | None |
| EN | Human | Fetal | Brain | 19-23wks., M/F pool of 5 | None |
| ET | Human | Adult | Testes | 10-61yrs., pool of 11 | None |
| EZ | Human | Fetal | Kidney | N/A | None |
| FG | Human | Adult | Brain | N/A | None |
| FH | Human | Fetal | Brain | 19-23wks., M/F pool of 5 | None |
| FJ | Human | Adult | Lung | Carcinoma line | None |
| FS | Human | Adult | Testes | 10-61yrs., pool of 11 | None |
| FX | Human | Fetal | Brain | 19-23wks., M/F pool of 5 | None |
| FY | Human | Fetal | Placenta | 26yrs., 1 specimen | None |
| FZ | Human | Fetal | Placenta | 26yrs., 1 specimen | None |
| G | Human | Adult | Blood | PBMC | ConA + PMA |
| GE | Human | Adult | Brain | N/A | None |
| GX | Human | Adult | Brain | N/A | None |
| GY | Human | Adult | Testes | 10-61yrs., pool of 11 | None |
| H | Human | Adult | Blood | PBMC | PHA + PMA + MLR |
| HC | Human | Fetal | Brain | 19-23wks., M/F pool of 5 | None |
| HZ | Human | Adult | Brain | Thalamus | None |
| IG | Human | Adult | Testes | 10-61yrs., pool of 11 | None |
| IJ | Human | Adult | Blood | PBMC | G-CSF in vivo |
| IK | Human | Adult | Retina | Retinoblastoma Y79 line | None |
| IS | Human | Adult | Trachea | N/A | None |
| J | Human | Adult | Blood | PBMC | PHA + PMA + MLR |
| K | Mouse | Adult | Bone Marrow | Stromal line FCM-4 | None |
| KJ | Human | Fetal | Brain | N/A | None |
| KM | Human | Adult | Retina | Retinoblastoma Y79 line | None |
| KZ | Human | Adult | Retina | 16-75yrs., pool of 76 | None |
| LF | Human | Adult | Spinal Cord | N/A | None |
| LR | Human | Adult | Lymph Node | N/A | None |
| LT | Human | Adult | Retina | Retinoblastoma Y79 line | None |
| LU | Human | Adult | Retina | Retinoblastoma Y79 line | None |
| M | Human | Adult | Neural | Glioblastoma line T98G | None |
| MA | Human | Fetal | Carcinoma | NTD2-1 line | None |
| MD | Human | Fetal | Kidney | N/A | None |
| ME | Human | Adult | Brain | Substantia Nigra | None |
| ML | Human | Adult | Brain | Caudate Nucleus | None |
| MM | Human | Adult | Retina | WERI-Rb1 retinoblastoma line | None |
| MN | Human | Adult | Brain | Hippocampus | None |
| MR | Human | Adult | Testes | N/A | None |
| NA | Human | Adult | Brain | Corpus Callosum | None |
| NB | Human | Adult | Spinal Cord | N/A | None |
| NF | Human | Adult | Brain | Substantia Nigra | None |
| NH | Human | Adult | Brain | Thalamus | None |
| NM | Human | Adult | Blood | Erythroleukemia TF-1 line | None |
| NN | Human | Adult | Kidney | 293 embryonal carcinoma line | None |
| NS | Human | Adult | Retina | WERI-Rb1 retinoblastoma line | None |
| NU | Human | Adult | Brain | Caudate Nucleus | None |
| NZ | Human | Adult | Blood | Erythroleukemia TF-1 line | None |
| O | Human | Adult | Blood | Dendritic Cells | None |
| OL | Mouse | Adult | Lymphocyte | Pro-B line FLEB14 | None |
| OM | Mouse | Adult | Brain | Glioma line T98G | IL-1 |
| ON | Mouse | Adult | Brain | Glioma line T98G | IL-1 |
| OP | Mouse | Adult | Brain | Glioma line T98G | IL-1 |
| OR | Human | Adult | Brain | Glioma line T98G | IL-1 |
| OS | Human | Fetal | UC | Endothelial line HUV-EC-C | None |
| PE | Human | Adult | Blood | K562 chronic ML line | None |
| PG | Human | Adult | Thyroid | N/A | None |
| PI | Human | Adult | Thyroid | N/A | None |
| PJ | Human | Adult | Testes | EC NT2D1 line | RA for 23 days |
| PK | Human | Adult | Kidney | 293 embryonal carcinoma line | None |
| PL | Human | Adult | Kidney | 293 embryonal carcinoma line | None |
| PM | Human | Adult | Kidney | 293 embryonal carcinoma line | None |
| PP | Human | Adult | Blood | LL MOLT-4 line | None |
| PT | Human | Adult | Blood | LL MOLT-4 line | None |
| PU | Human | Adult | Blood | PL HL-60 line | None |
| PV | Human | Adult | Brain | Cerebellum | None |
| PW | Human | Adult | Brain | Cerebellum | None |
| PX | Human | Adult | Brain | Cerebellum | None |
| Q | Mouse | Adult | Bone Marrow | N/A | 5 fluoro-uracil |
| QB | Human | Adult | Bladder | 5637 carcinoma line | None |
| QC | Human | Adult | Neural | Neuroepithelioma HTB-10 line | None |
| QF | Human | Adult | Bladder | 5637 carcinoma line | None |
| QG | Human | Adult | Neural | Neuroepithelioma HTB-10 line | None |
| QM | Human | Adult | Blood | Histiocytic lymphoma U937 line | None |
| QU | Human | Adult | Blood | K562 chronic ML line | None |
| QV | Human | Adult | Testes | EC NT2D1 line | RA for 23 days |
| QX | Human | Adult | Bone | RD-ES line | None |
| QY | Human | Adult | Blood | PL HL-60 line | None |
| RA | Human | Adult | Brain | Substantia Nigra | None |
| RB | Human | Adult | Kidney | 293 embryonal carcinoma line | None |
| RD | Human | Adult | Kidney | 293 embryonal carcinoma line | None |
| RG | Human | Adult | Blood | PL HL-60 line | None |
| RJ | Human | Adult | Neural | Neuroepithelioma HTB-10 line | None |
| WA | Xenopus | Fetal | Embryo | Dorsal Mesoderm | None |
| WG | Xenopus | Fetal | Embryo | Dorsal Mesoderm | None |
| YA | Human | Adult | Testes | 10-61yrs., pool of 11 | None |
| YAA | Human | Adult | Bone | Osteosarcoma MG63 line | None |
| YB | Human | Fetal | Brain | 19-23wks., M/F pool of 5 | None |
| YBA | Human | Adult | Lymph Node | N/A | None |
| YC | Human | Adult | Kidney | 293 embryonal carcinoma line | None |
| YCA | Human | Adult | Thymus | N/A | None |
| YD | Human | Adult | Brain | N/A | None |

[0030] TABLE 3
Cell Type and Treatment Key:

| | |
|---|---|
| 2-12d post LIF: | 2-12 days after LIF removal |
| ConA: | concanavalin A |
| EC: | Embryonal Carcinoma |
| G-CSF: | granulocyte-colony stimulating factor |
| LL: | Lymphoblastic Leukemia |
| ML: | myelogenous leukemia |
| MLR: | mixed lymphocyte reaction |
| PHA: | phytohemagglutinin |
| PL: | Promyelocytic Leukemia |
| PMA: | phorbol myristate acetate |
| PMBC: | peripheral blood mononuclear cells |
| RA: | retinoic acid |
| RA+activin: | Pool of RA-treated + activin-treated + untreated tissue |
| UC: | Umbilical Cord |

[0031] Thus, the tissue source for a particular sEST sequence can be identified in Table 3 by the one and two letter designations used in the relevant “Clone ID No.” in Table 2. For example, a sEST designated as “PP85” would have been isolated from a human adult blood (lymphoblastic leukemia MOLT-4) library (i.e., selection “PP”) as indicated in Table 3. These sEST sequences were then used to isolate the full-length cDNA clones listed in Table 2; these full-length cDNA clones are generally human cDNA clones as described in the Sequence Listing appended hereto.

[0032] As used herein, “polynucleotide” includes single- and double-stranded RNAs, DNAs and RNA:DNA hybrids.

[0033] As used herein a “secreted” protein is one which, when expressed in a suitable host cell, is transported across or through a membrane, including transport as a result of signal sequences in its amino acid sequence. “Secreted” proteins include without limitation proteins secreted wholly (e.g., soluble proteins) or partially (e.g., receptors) from the cell in which they are expressed. “Secreted” proteins also include without limitation proteins which are transported across the membrane of the endoplasmic reticulum.

[0034] Fragments of the proteins of the present invention which are capable of exhibiting biological activity are also encompassed by the present invention. Fragments of the protein may be in linear form or they may be cyclized using known methods, for example, as described in H. U. Saragovi, et al., Bio/Technology 10, 773-778 (1992) and in R. S. McDowell, et al., J. Amer. Chem. Soc. 114 9245-9253 (1992), both of which are incorporated herein by reference. Such fragments may be fused to carrier molecules such as immunoglobulins for many purposes, including increasing the valency of protein binding sites. For example, fragments of the protein may be fused through “linker” sequences to the Fc portion of an immunoglobulin. For a bivalent form of the protein, such a fusion could be to the Fc portion of an IgG molecule. Other immunoglobulin isotypes may also be used to generate such fusions. For example, a protein-IgM fusion would generate a decavalent form of the protein of the invention.

[0035] The present invention also provides both full-length and mature forms of the disclosed proteins. The full-length form of the such proteins is identified in the sequence listing by translation of the nucleotide sequence of each disclosed clone. The mature form(s) of such protein may be obtained by expression of the disclosed full-length polynucleotide (preferably those deposited with ATCC) in a suitable mammalian cell or other host cell. The sequence(s) of the mature form(s) of the protein may also be determinable from the amino acid sequence of the full-length form.

[0036] The present invention also provides genes corresponding to the polynucleotide sequences disclosed herein. “Corresponding genes” are the regions of the genome that are transcribed to produce the mRNAs from which cDNA polynucleotide sequences are derived and may include contiguous regions of the genome necessary for the regulated expression of such genes. Corresponding genes may therefore include but are not limited to coding sequences, 5′ and 3′ untranslated regions, alternatively spliced exons, introns, promoters, enhancers, and silencer or suppressor elements. The corresponding genes can be isolated in accordance with known methods using the sequence information disclosed herein. Such methods include the preparation of probes or primers from the disclosed sequence information for identification and/or amplification of genes in appropriate genomic libraries or other sources of genomic materials. An “isolated gene” is a gene that has been separated from the adjacent coding sequences, if any, present in the genome of the organism from which the gene was isolated.

[0037] The chromosomal location corresponding to the polynucleotide sequences disclosed herein may also be determined, for example by hybridizing appropriately labeled polynucleotides of the present invention to chromosomes in situ. It may also be possible to determine the corresponding chromosomal location for a disclosed polynucleotide by identifying significantly similar nucleotide sequences in public databases, such as expressed sequence tags (ESTs), that have already been mapped to particular chromosomal locations. For at least some of the polynucleotide sequences disclosed herein, public database sequences having at least some similarity to the polynucleotide of the present invention have been listed by database accession number. Searches using the GenBank accession numbers of these public database sequences can then be performed at an Internet site provided by the National Center for Biotechnology Information having the address www.ncbi.nlm.nih.gov/UniGene, in order to identify “UniGene clusters” of overlapping sequences. Many of the “UniGene clusters” so identified will already have been mapped to particular chromosomal sites.

[0038] Organisms that have enhanced, reduced, or modified expression of the gene(s) corresponding to the polynucleotide sequences disclosed herein are provided. The desired change in gene expression can be achieved through the use of antisense polynucleotides or ribozymes that bind and/or cleave the mRNA transcribed from the gene (Albert and Morris, 1994, Trends Pharmacol. Sci. 15(7): 250-254; Lavarosky et al., 1997, Biochem. Mol. Med. 62(1): 11-22; and Hampel, 1998, Prog. Nucleic Acid Res. Mol. Biol. 58: 1-39; all of which are incorporated by reference herein). Transgenic animals that have multiple copies of the gene(s) corresponding to the polynucleotide sequences disclosed herein, preferably produced by transformation of cells with genetic constructs that are stably maintained within the transformed cells and their progeny, are provided. Transgenic animals that have modified genetic control regions that increase or reduce gene expression levels, or that change temporal or spatial patterns of gene expression, are also provided (see European Patent No. 0 649 464 B1, incorporated by reference herein). In addition, organisms are provided in which the gene(s) corresponding to the polynucleotide sequences disclosed herein have been partially or completely inactivated, through insertion of extraneous sequences into the corresponding gene(s) or through deletion of all or part of the corresponding gene(s). Partial or complete gene inactivation can be accomplished through insertion, preferably followed by imprecise excision, of transposable elements (Plasterk, 1992, Bioessays 14(9): 629-633; Zwaal et al., 1993, Proc. Natl. Acad. Sci. USA 90(16): 7431-7435; Clark et al., 1994, Proc. Natl. Acad. Sci. USA 91(2): 719-722; all of which are incorporated by reference herein), or through homologous recombination, preferably detected by positive/negative genetic selection strategies (Mansour et al., 1988, Nature 336: 348-352; U.S. Pat. Nos. 5,464,764; 5,487,992; 5,627,059; 5,631,153; 5,614,396; 5,616,491; and 5,679,523; all of which are incorporated by reference herein). These organisms with altered gene expression are preferably eukaryotes and more preferably are mammals. Such organisms are useful for the development of non-human models for the study of disorders involving the corresponding gene(s), and for the development of assay systems for the identification of molecules that interact with the protein product(s) of the corresponding gene(s).

[0039] Where the protein of the present invention is membrane-bound (e.g., is a receptor), the present invention also provides for soluble forms of such protein. In such forms part or all of the intracellular and transmembrane domains of the protein are deleted such that the protein is fully secreted from the cell in which it is expressed. The intracellular and transmembrane domains of proteins of the invention can be identified in accordance with known techniques for determination of such domains from sequence information.

[0040] Proteins and protein fragments of the present invention include proteins with amino acid sequence lengths that are at least 25%(more preferably at least 50%, and most preferably at least 75%) of the length of a disclosed protein and have at least 60% sequence identity (more preferably, at least 75% identity; most preferably at least 90% or 95% identity) with that disclosed protein, where sequence identity is determined by comparing the amino acid sequences of the proteins when aligned so as to maximize overlap and identity while minimizing sequence gaps. Also included in the present invention are proteins and protein fragments that contain a segment preferably comprising 8 or more (more preferably 20 or more, most preferably 30 or more) contiguous amino acids that shares at least 75% sequence identity (more preferably, at least 85% identity; most preferably at least 95% identity) with any such segment of any of the disclosed proteins.

[0041] In particular, sequence identity may be determined using WU-BLAST (Washington University BLAST) version 2.0 software, which builds upon WU-BLAST version 1.4, which in turn is based on the public domain NCBI-BLAST version 1.4 (Altschul and Gish, 1996, Local alignment statistics, Doolittle ed., Methods in Enzymology 266: 460-480; Altschul et al., 1990, Basic local alignment search tool, Journal of Molecular Biology 215: 403-410; Gish and States, 1993, Identification of protein coding regions by database similarity search, Nature Genetics 3: 266-272; Karlin and Altschul, 1993, Applications and statistics for multiple high-scoring segments in molecular sequences, Proc. Natl. Acad. Sci. USA 90: 5873-5877; all of which are incorporated by reference herein). WU-BLAST version 2.0 executable programs for several UNIX platforms can be downloaded from the Internet file-transfer protocol (FTP) site ftp://blast.wustl.edu/blast/executables. The complete suite of search programs (BLASTP, BLASTN, BLASTX, TBLASTN, and TBLASTX) is provided at that site, in addition to several support programs. BU-BLAST 2.0 is copyrighted and may not be sold or redistributed in any form or manner without the express written consent of the author; but the posted executables may otherwise be freely used for commercial, nonprofit, or academic purposes. In all search programs in the suite—BLASTP, BLASTN, BLASTX, TBLASTN and TBLASTX—the gapped alignment routines are integral to the database search itself, and thus yield much better sensitivity and selectivity while producing the more easily interpreted output. Gapping can optionally be turned off in all of these programs, if desired. The default penalty (Q) for a gap of length one is Q=9 for proteins and BLASTP, and Q=10 for BLASTN, but may be changed to any integer value including zero, one through eight, nine, ten, eleven, twelve through twenty, twenty-one through fifty, fifty-one through one hundred, etc. The default per-residue penalty for extending a gap (R) is R=2 for proteins and BLASTP, and R=10 for BLASTN, but may be changed to any integer value including zero, one, two, three, four, five, six, seven, eight, nine, ten, eleven, twelve through twenty, twenty-one through fifty, fifty-one through one hundred, etc. Any combination of values for Q and R can be used in order to align sequences so as to maximize overlap and identity while minimizing sequence gaps. The default amino acid comparison matrix is BLOSUM62, but other amino acid comparison matrices such as PAM can be utilized.

[0042] Species homologues of the disclosed polynucleotides and proteins are also provided by the present invention. As used herein, a “species homologue” is a protein or polynucleotide with a different species of origin from that of a given protein or polynucleotide, but with significant sequence similarity to the given protein or polynucleotide. Preferably, polynucleotide species homologues have at least 60% sequence identity (more preferably, at least 75% identity; most preferably at least 90% identity) with the given polynucleotide, and protein species homologues have at least 30% sequence identity (more preferably, at least 45% identity; most preferably at least 60% identity) with the given protein, where sequence identity is determined by comparing the nucleotide sequences of the polynucleotides or the amino acid sequences of the proteins when aligned so as to maximize overlap and identity while minimizing sequence gaps. Species homologues may be isolated and identified by making suitable probes or primers from the sequences provided herein and screening a suitable nucleic acid source from the desired species. Preferably, species homologues are those isolated from mammalian species. Most preferably, species homologues are those isolated from certain mammalian species such as, for example, Pan troglodytes, Gorilla gorilla, Pongo pygmaeus, Hylobates concolor, Macaca mulatta, Papio papio, Papio hamadryas, Cercopithecus aethiops, Cebus capucinus, Aotus trivirgatus, Sanguinus oedipus, Microcebus murinus, Mus musculus, Rattus norvegicus, Cricetulus griseus, Felis catus, Mustela vison, Canis familiaris, Oryctolagus cuniculus, Bos taurus, Ovis aries, Sus scrofa, and Equus caballus, for which genetic maps have been created allowing the identification of syntenic relationships between the genomic organization of genes in one species and the genomic organization of the related genes in another species (O'Brien and Seu'anez, 1988, Ann. Rev. Genet. 22: 323-351; O'Brien et al., 1993, Nature Genetics 3:103-112; Johansson et al., 1995, Genomics 25: 682-690; Lyons et al., 1997, Nature Genetics 15: 47-56; O'Brien et al., 1997, Trends in Genetics 13(10): 393-399; Carver and Stubbs, 1997, Genome Research 7:1123-1137; all of which are incorporated by reference herein).

[0043] The invention also encompasses allelic variants of the disclosed polynucleotides or proteins; that is, naturally-occurring alternative forms of the isolated polynucleotides which also encode proteins which are identical or have significantly similar sequences to those encoded by the disclosed polynucleotides. Preferably, allelic variants have at least 60% sequence identity (more preferably, at least 75% identity; most preferably at least 90% identity) with the given polynucleotide, where sequence identity is determined by comparing the nucleotide sequences of the polynucleotides when aligned so as to maximize overlap and identity while minimizing sequence gaps. Allelic variants may be isolated and identified by making suitable probes or primers from the sequences provided herein and screening a suitable nucleic acid source from individuals of the appropriate species.

[0044] The invention also includes polynucleotides with sequences complementary to those of the polynucleotides disclosed herein.

[0045] The present invention also includes polynucleotides that hybridize under reduced stringency conditions, more preferably stringent conditions, and most preferably highly stringent conditions, to polynucleotides described herein. Examples of stringency conditions are shown in the table below: highly stringent conditions are those that are at least as stringent as, for example, conditions A-F; stringent conditions are at least as stringent as, for example, conditions G-L; and reduced stringency conditions are at least as stringent as, for example, conditions M-R.

| | | Hybrid | | Wash |
|---|---|---|---|---|
| Stringency | Polynucleotide | Length | Hybridization Temperature and | Temperature |
| Condition | Hybrid | (bp)^{‡} | Buffer^{\} | and Buffer^{\} |
| A | DNA:DNA | ≧50 | 65° C.; 1 × SSC -or- | 65° C.; 0.3 × SSC |
| | | | 42° C.; 1 × SSC, 50% formamide | |
| B | DNA:DNA | <50 | T_{B}*; 1 × SSC | T_{B}*; 1 × SSC |
| C | DNA:RNA | ≧50 | 67° C.; 1 × SSC -or- | 67° C.; 0.3 × SSC |
| | | | 45° C.; 1 × SSC, 50% formamide | |
| D | DNA:RNA | <50 | T_{D}*; 1 × SSC | T_{D}*; 1 × SSC |
| E | RNA:RNA | ≧50 | 70° C.; 1 × SSC -or- | 70° C.; 0.3 × SSC |
| | | | 50° C.; 1 × SSC, 50% formamide | |
| F | RNA:RNA | <50 | T_{F}*; 1 × SSC | T_{F}*; 1 × SSC |
| G | DNA:DNA | ≧50 | 65° C; 4 × SSC -or- | 65° C.; 1 × SSC |
| | | | 42° C.; 4 × SSC, 50% formamide | |
| H | DNA:DNA | <50 | T_{H}*; 4 × SSC | T_{H}*; 4 × SSC |
| I | DNA:RNA | ≧50 | 67° C.; 4 × SSC -or- | 67° C.; 1 × SSC |
| | | | 45° C.; 4 × SSC, 50% formamide | |
| J | DNA:RNA | <50 | T_{J}*; 4 × SSC | T_{J}*; 4 × SSC |
| K | RNA:RNA | ≧50 | 70° C.; 4 × SSC -or- | 67° C.; 1 × SSC |
| | | | 50° C.; 4 × SSC, 50% formamide | |
| L | RNA:RNA | <50 | T_{L}*; 2 × SSC | T_{L}*; 2 × SSC |
| M | DNA:DNA | ≧50 | 50° C.; 4 × SSC -or- | 50° C.; 2 × SSC |
| | | | 40° C.; 6 × SSC, 50% formamide | |
| N | DNA:DNA | <50 | T_{N}*; 6 × SSC | T_{N}*; 6 × SSC |
| O | DNA:RNA | ≧50 | 55° C.; 4 × SSC -or- | 55° C.; 2 × SSC |
| | | | 42° C.; 6 × SSC, 50% formamide | |
| P | DNA:RNA | <50 | T_{P}*; 6 × SSC | T_{P}*; 6 × SSC |
| Q | RNA:RNA | ≧50 | 60° C.; 4 × SSC -or- | 60° C.; 2 × SSC |
| | | | 45° C.; 6 × SSC, 50% formamide | |
| R | RNA:RNA | <50 | T_{R}*; 4 × SSC | T_{R}*; 4 × SSC |
| ^{‡}: The hybrid length is that anticipated for the hybridized region(s) of the hybridizing polynucleotides. When hybridizing a polynucleotide to a target polynucleotide of unknown sequence, the hybrid length is assumed to be that of the hybridizing polynucleotide. When polynucleotides of known sequence are hybridized, the hybrid length | | | | |
| # can be determined by aligning the sequences of the polynucleotides and identifying the region or regions of optimal sequence complementarity. | | | | |
| ^{\}: SSPE (1 × SSPE is 0.15 M NaCl, 10 mM NaH₂PO_{4, and 1.25 mM EDTA, pH 7.4) can be substituted for SSC (1 × SSC is 0.15 M NaCl and 15 mM sodium citrate) in the hybridization and wash buffers; washes are performed for 15 minutes after hybridization is complete.} | | | | |
| *T_{B}-T_{R}: The hybridization temperature for hybrids anticipated to be less than 50 base pairs in length should be 5-10° C. less than the melting temperature (Tₘ) of the hybrid, where Tₘ is determined according to the following equations. For hybrids less than 18 base pairs in length, Tₘ(° C.) = | | | | |
| # 2(# of A + T bases) + 4(# of G + C bases). For hybrids between 18 and 49 base pairs in length, Tₘ(° C.) = 81.5 + 16.6(log₁₀[Na⁺]) + 0.41(% G + C) − (600/N), where N is the number of bases in the hybrid, and [Na⁺] is the concentration of sodium | | | | |
| # ions in the hybridization buffer ([Na⁺] for 1 × SSC = 0.165 M). | | | | |

[0046] Additional examples of stringency conditions for polynucleotide hybridization are provided in Sambrook, J., E. F. Fritsch, and T. Maniatis, 1989, Molecular Cloning: A Laboratory Manual, Cold Spring Harbor Laboratory Press, Cold Spring Harbor, N.Y., chapters 9 and 11, and Current Protocols in Molecular Biology, 1995, F. M. Ausubel et al., eds., John Wiley & Sons, Inc., sections 2.10 and 6.3-6.4, incorporated herein by reference.

[0047] Preferably, each such hybridizing polynucleotide has a length that is at least 25% (more preferably at least 50%, and most preferably at least 75%) of the length of the polynucleotide of the present invention to which it hybridizes, and has at least 60% sequence identity (more preferably, at least 75% identity; most preferably at least 90% or 95% identity) with the polynucleotide of the present invention to which it hybridizes, where sequence identity is determined by comparing the sequences of the hybridizing polynucleotides when aligned so as to maximize overlap and identity while minimizing sequence gaps.

[0048] The isolated polynucleotide of the invention may contain sequences at its 5′ and/or 3′ end that are derived from linker, polylinker, or multiple cloning site sequences commonly found in vectors such as the pMT2 or pED expression vectors (see below). For example, sequences such as SEQ ID NO: 626, SEQ ID NO: 627, or SEQ ID NO: 628 may be found at the 5′ end of an isolated polynucleotide of the invention, or the complement of any of these sequences may be found at its 3′ end. Similarly, sequences such as SEQ ID NO: 629, SEQ ID NO: 630, or SEQ ID NO: 631 may be found at the 3′ end of an isolated polynucleotide of the invention, or the complement of any of these sequences may be found at its 5′ end. In addition, variants of these linker sequences may be present in isolated polynucleotides of the invention, which linker variants vary from SEQ ID NO: 626 through SEQ ID NO: 631 by the alteration, insertion, or deletion of one or more nucleotides. Therefore, a preferred embodiment of the invention comprises the nucleotide sequence of any of the isolated polynucleotides disclosed herein, beginning at nucleotide 25 and ending at nucleotide (N-25) of the SEQ ID NO for that polynucleotide, where N represents the total number of nucleotides in the sequence. As a specific example, a preferred embodiment of the invention comprises the nucleotide sequence of SEQ ID NO: 1 from nucleotide 25 to nucleotide 1616, where the total number of nucleotides (N) in SEQ ID NO: 1 is 1641, and N-25 equals 1616. More preferably, a polynucleotide of the invention comprises the nucleotide sequence of any of the isolated polynucleotides disclosed herein, beginning at nucleotide 30 and ending at nucleotide (N-30) of the SEQ ID NO for that polynucleotide. Most preferably, a polynucleotide of the invention comprises the nucleotide sequence of any of the isolated polynucleotides disclosed herein, beginning at nucleotide 35 and ending at nucleotide (N-35) of the SEQ ID NO for that polynucleotide. Similarly, additional embodiments are those nucleotide sequences that extend from nucleotide 40 to nucleotide (N-40), or from nucleotide 45 to nucleotide (N-45), or from nucleotide 50 to nucleotide (N-50), or from nucleotide 60 to nucleotide (N-60), or from nucleotide 65 to nucleotide (N-65), or from nucleotide 70 to nucleotide (N-70), or from nucleotide 75 to nucleotide (N- 75), or from nucleotide 80 to nucleotide (N-80), etc., for any of the polynucleotides disclosed herein. Further preferred embodiments are those nucleotide sequences that are subsequences of the nucleotide sequences disclosed herein, beginning at any nucleotide position selected from the group consisting of nucleotide 5, nucleotide 10, nucleotide 15, nucleotide 20, nucleotide 25, nucleotide 30, nucleotide 35, nucleotide 40, nucleotide 45, nucleotide 50, nucleotide 55, nucleotide 60, nucleotide 65, nucleotide 70, nucleotide 75, or nucleotide 80, and ending at any nucleotide position selected from the group consisting of nucleotide (N-5), nucleotide (N-10), nucleotide (N-15), nucleotide (N-20), nucleotide (N-25), nucleotide (N-30), nucleotide (N-35), nucleotide (N-40), nucleotide (N-45), nucleotide (N-50), nucleotide (N-55), nucleotide (N-60), nucleotide (N-65), nucleotide (N-70), nucleotide (N-75), or nucleotide (N-80), wherein N is the total number of nucleotides disclosed for a particular SEQ ID NO.

[0049] The isolated polynucleotide of the invention may be operably linked to an expression control sequence such as the pMT2 or pED expression vectors disclosed in Kaufman et al., Nucleic Acids Res. 19, 4485-4490 (1991), in order to produce the protein recombinantly. Many suitable expression control sequences are known in the art. General methods of expressing recombinant proteins are also known and are exemplified in R. Kaufman, Methods in Enzymology 185, 537-566 (1990). As defined herein “operably linked” means that the isolated polynucleotide of the invention and an expression control sequence are situated within a vector or cell in such a way that the protein is expressed by a host cell which has been transformed (transfected) with the ligated polynucleotide/ expression control sequence.

[0050] A number of types of cells may act as suitable host cells for expression of the protein. Mammalian host cells include, for example, monkey COS cells, Chinese Hamster Ovary (CHO) cells, human kidney 293 cells, human epidermal A431 cells, human Colo205 cells, 3T3 cells, CV-1 cells, other transformed primate cell lines, normal diploid cells, cell strains derived from in vitro culture of primary tissue, primary explants, HeLa cells, mouse L cells, BHK, HL-60, U937, HaK or Jurkat cells.

[0051] Alternatively, it may be possible to produce the protein in lower eukaryotes such as yeast or in prokaryotes such as bacteria. Potentially suitable yeast strains include Saccharomyces cerevisiae, Schizosaccharomyces pombe, Kluyveromyces strains, Candida, or any yeast strain capable of expressing heterologous proteins. Potentially suitable bacterial strains include Escherichia coli, Bacillus subtilis, Salmonella typhimurium, or any bacterial strain capable of expressing heterologous proteins. If the protein is made in yeast or bacteria, it may be necessary to modify the protein produced therein, for example by phosphorylation or glycosylation of the appropriate sites, in order to obtain the functional protein. Such covalent attachments may be accomplished using known chemical or enzymatic methods.

[0052] The protein may also be produced by operably linking the isolated polynucleotide of the invention to suitable control sequences in one or more insect expression vectors, and employing an insect expression system. Materials and methods for baculovirus/ insect cell expression systems are commercially available in kit form from, e.g., Invitrogen, San Diego, Calif. U.S.A. (the MaxBac® kit), and such methods are well known in the art, as described in Summers and Smith, Texas Agricultural Experiment Station Bulletin No. 1555 (1987), incorporated herein by reference. As used herein, an insect cell capable of expressing a polynucleotide of the present invention is “transformed.”

[0053] The protein of the invention may be prepared by culturing transformed host cells under culture conditions suitable to express the recombinant protein. The resulting expressed protein may then be purified from such culture (i.e., from culture medium or cell extracts) using known purification processes, such as gel filtration and ion exchange chromatography. The purification of the protein may also include an affinity column containing agents which will bind to the protein; one or more column steps over such affinity resins as concanavalin A-agarose, heparin-toyopearl® or Cibacrom blue 3GA Sepharose®; one or more steps involving hydrophobic interaction chromatography using such resins as phenyl ether, butyl ether, or propyl ether; or immunoaffinity chromatography.

[0054] Alternatively, the protein of the invention may also be expressed in a form which will facilitate purification. For example, it may be expressed as a fusion protein, such as those of maltose binding protein (MBP), glutathione-S-transferase (GST) or thioredoxin (TRX). Kits for expression and purification of such fusion proteins are commercially available from New England BioLabs (Beverly, Mass.), Pharmacia (Piscataway, N.J.) and Invitrogen Corporation (Carlsbad, Calif.), respectively. The protein can also be tagged with an epitope and subsequently purified by using a specific antibody directed to such epitope. One such epitope (“Flag”) is commercially available from the Eastman Kodak Company (New Haven, Conn.).

[0055] Finally, one or more reverse-phase high performance liquid chromatography (RP-HPLC) steps employing hydrophobic RP-HPLC media, e.g., silica gel having pendant methyl or other aliphatic groups, can be employed to further purify the protein. Some or all of the foregoing purification steps, in various combinations, can also be employed to provide a substantially homogeneous isolated recombinant protein. The protein thus purified is substantially free of other mammalian proteins and is defined in accordance with the present invention as an “isolated protein.”

[0056] The protein of the invention may also be expressed as a product of transgenic animals, e.g., as a component of the milk of transgenic cows, goats, pigs, or sheep which are characterized by somatic or germ cells containing a nucleotide sequence encoding the protein.

[0057] The protein may also be produced by known conventional chemical synthesis. Methods for constructing the proteins of the present invention by synthetic means are known to those skilled in the art. The synthetically-constructed protein sequences, by virtue of sharing primary, secondary or tertiary structural and/ or conformational characteristics with proteins may possess biological properties in common therewith, including protein activity. Thus, they may be employed as biologically active or immunological substitutes for natural, purified proteins in screening of therapeutic compounds and in immunological processes for the development of antibodies.

[0058] The proteins provided herein also include proteins characterized by amino acid sequences similar to those of purified proteins but into which modification are naturally provided or deliberately engineered. For example, modifications in the peptide or DNA sequences can be made by those skilled in the art using known techniques. Modifications of interest in the protein sequences may include the alteration, substitution, replacement, insertion or deletion of a selected amino acid residue in the coding sequence. For example, one or more of the cysteine residues may be deleted or replaced with another amino acid to alter the conformation of the molecule. Techniques for such alteration, substitution, replacement, insertion or deletion are well known to those skilled in the art (see, e.g., U.S. Pat. No. 4,518,584). Preferably, such alteration, substitution, replacement, insertion or deletion retains the desired activity of the protein.

[0059] Other fragments and derivatives of the sequences of proteins which would be expected to retain protein activity in whole or in part and may thus be useful for screening or other immunological methodologies may also be easily made by those skilled in the art given the disclosures herein. Such modifications are believed to be encompassed by the present invention.

[0060] Uses and Biological Activity

[0061] The polynucleotides and proteins of the present invention are expected to exhibit one or more of the uses or biological activities (including those associated with assays cited herein) identified below. Uses or activities described for proteins of the present invention may be provided by administration or use of such proteins or by administration or use of polynucleotides encoding such proteins (such as, for example, in gene therapies or vectors suitable for introduction of DNA).

[0062] Research Uses and Utilities

[0063] The polynucleotides provided by the present invention can be used by the research community for various purposes. The primary use of polynucleotides of the invention which are sESTs is as porbes for the identification and isolation of full-length cDNAs and genomic DNA molecules which correspond (i.e., is a longer polynucleotide sequence of which substantially the entire sEST is a fragment in the case of a full-length cDNA, or which encodes the sEST in the case of a genomic DNA molecule) to such sESTs. Techniques for use of such sequences as probes for larger cDNAs or genomic molecules are well known in the art.

[0064] The polynucleotides can also be used to express recombinant protein for analysis, characterization or therapeutic use; as markers for tissues in which the corresponding protein is preferentially expressed (either constitutively or at a particular stage of tissue differentiation or development or in disease states); as molecular weight markers on Southern gels; as chromosome markers or tags (when labeled) to identify chromosomes or to map related gene positions; to compare with endogenous DNA sequences in patients to identify potential genetic disorders; as probes to hybridize and thus discover novel, related DNA sequences; as a source of information to derive PCR primers for genetic fingerprinting; as a probe to “subtract-out” known sequences in the process of discovering other novel polynucleotides; for selecting and making oligomers for attachment to a “gene chip” or other support, including for examination of expression patterns; to raise anti-protein antibodies using DNA immunization techniques; and as an antigen to raise anti-DNA antibodies or elicit another immune response. Where the polynucleotide encodes a protein which binds or potentially binds to another protein (such as, for example, in a receptor-ligand interaction), the polynucleotide can also be used in interaction trap assays (such as, for example, that described in Gyuris et al., Cell 75:791-803 (1993)) to identify polynucleotides encoding the other protein wish which binding occurs or to identify inhibitors of the binding interaction.

[0065] The proteins provided by the present invention can similarly be used in assay to determine biological activity, including in a panel of multiple proteins for high-throughput screening; to raise antibodies or to elicit another immune response; as a reagent (including the labeled reagent) in assays designed to quantitatively determine levels of the protein (or its receptor) in biological fluids; as markers for tissues in which the corresponding protein is preferentially expressed (either constitutively or at a particular stage of tissue differentiation or development or in a disease state); and, of course, to isolate correlative receptors or ligands. Where the protein binds or potentially binds to another protein (such as, for example, in a receptor-ligand interaction), the protein can be used to identify the other protein with which binding occurs or to identify inhibitors of the binding interaction. Proteins involved in these binding interactions can also be used to screen for peptide or small molecule inhibitors or agonists of the binding interaction.

[0066] Any or all of these research utilities are capable of being developed into reagent grade or kit format for commercialization as research products.

[0067] Methods for performing the uses listed above are well known to those skilled in the art. References disclosing such methods include without limitation “Molecular Cloning: A Laboratory Manual”, 2d ed., Cold Spring Harbor Laboratory Press, Sambrook, J., E. F. Fritsch and T. Maniatis eds., 1989, and “Methods in Enzymology: Guide to Molecular Cloning Techniques”, Academic Press, Berger, S. L. and A. R. Kimmel eds., 1987.

[0068] Nutritional Uses

[0069] Polynucleotides and proteins of the present invention can also be used as nutritional sources or supplements. Such uses include without limitation use as a protein or amino acid supplement, use as a carbon source, use as a nitrogen source and use as a source of carbohydrate. In such cases the protein or polynucleotide of the invention can be added to the feed of a particular organism or can be administered as a separate solid or liquid preparation, such as in the form of powder, pills, solutions, suspensions or capsules. In the case of microorganisms, the protein or polynucleotide of the invention can be added to the medium in or on which the microorganism is cultured.

[0070] Cytokine and Cell Proliferation/Differentiation Activity

[0071] A protein of the present invention may exhibit cytokine, cell proliferation (either inducing or inhibiting) or cell differentiation (either inducing or inhibiting) activity or may induce production of other cytokines in certain cell populations. Many protein factors discovered to date, including all known cytokines, have exhibited activity in one or more factor dependent cell proliferation assays, and hence the assays serve as a convenient confirmation of cytokine activity. The activity of a protein of the present invention is evidenced by any one of a number of routine factor dependent cell proliferation assays for cell lines including, without limitation, 32D, DA2, DA1G, T10, B9, B9/11, BaF3, MC9/G, M+ (preB M+), 2E8, RB5, DA1, 123, T1165, HT2, CTLL2, TF-1, Mo7e and CMK.

[0072] The activity of a protein of the invention may, among other means, be measured by the following methods:

[0073] Assays for T-cell or thymocyte proliferation include without limitation those described in: Current Protocols in Immunology, Ed by J. E. Coligan, A. M. Kruisbeek, D. H. Margulies, E. M. Shevach, W Strober, Pub. Greene Publishing Associates and Wiley-Interscience (Chapter 3, In Vitro assays for Mouse Lymphocyte Function 3.1-3.19; Chapter 7, Immunologic studies in Humans); Takai et al., J. Immnunol. 137:3494-3500, 1986; Bertagnolli et al., J. Immunol. 145:1706-1712, 1990; Bertagnolli et al., Cellular Immunology 133:327-341, 1991; Bertagnolli, et al., J. Immunol. 149:3778-3783, 1992; Bowman et al., J. Immunol. 152: 1756-1761, 1994.

[0074] Assays for cytokine production and/or proliferation of spleen cells, lymph node cells or thymocytes include, without limitation, those described in: Polyclonal T cell stimulation, Kruisbeek, A. M. and Shevach, E. M. In Current Protocols in Immunology. J. E. e.a. Coligan eds. Vol 1 pp. 3.12.1-3.12.14, John Wiley and Sons, Toronto. 1994; and Measurement of mouse and human Interferon y, Schreiber, R. D. In Current Protocols in Immunology. J. E. e.a. Coligan eds. Vol 1 pp. 6.8.1-6.8.8, John Wiley and Sons, Toronto. 1994.

[0075] Assays for proliferation and differentiation of hematopoietic and lymphopoietic cells include, without limitation, those described in: Measurement of Human and Murine Interleukin 2 and Interleukin 4, Bottomly, K., Davis, L. S. and Lip sky, P. E. In Current Protocols in Immunology. J. E. e.a. Coligan eds. Vol 1 pp. 6.3.1-6.3.12, John Wiley and Sons, Toronto. 1991; deVries et al., J. Exp. Med. 173:1205-1211, 1991; Moreau et al., Nature 336:690-692, 1988; Greenberger et al., Proc. Natl. Acad. Sci. U.S.A. 80:2931-2938, 1983; Measurement of mouse and human interleukin 6 —Nordan, R. In Current Protocols in Immunology. J. E. e.a. Coligan eds. Vol 1 pp. 6.6.1-6.6.5, John Wiley and Sons, Toronto. 1991; Smith et al., Proc. Natl. Acad. Sci. U.S.A. 83:1857-1861, 1986; Measurement of human Interleukin 11—Bennett, F., Giannotti, J., Clark, S. C. and Turner, K. J. In Current Protocols in Immunology. J. E. e.a. Coligan eds. Vol 1 pp. 6.15.1 John Wiley and Sons, Toronto. 1991; Measurement of mouse and human Interleukin 9—Ciarletta, A., Giannotti, J., Clark, S. C. and Turner, K. J. In Current Protocols in Immunology. J. E. e.a. Coligan eds. Vol 1 pp. 6.13.1, John Wiley and Sons, Toronto. 1991.

[0076] Assays for T-cell clone responses to antigens (which will identify, among others, proteins that affect APC-T cell interactions as well as direct T-cell effects by measuring proliferation and cytokine production) include, without limitation, those described in: Current Protocols in Immunology, Ed by J. E. Coligan, A. M. Kruisbeek, D. H. Margulies, E. M. Shevach, W Strober, Pub. Greene Publishing Associates and Wiley-Interscience (Chapter 3, In Vitro assays for Mouse Lymphocyte Function; Chapter 6, Cytokines and their cellular receptors; Chapter 7, Immunologic studies in Humans); Weinberger et al., Proc. Natl. Acad. Sci. USA 77:6091-6095, 1980; Weinberger et al., Eur. J. Immun. 11:405-411, 1981; Takai et al., J. Immunol. 137:3494-3500, 1986; Takai et al., J. Immunol. 140:508-512, 1988.

[0077] Immune Stimulating or Suppressing Activity

[0078] A protein of the present invention may also exhibit immune stimulating or immune suppressing activity, including without limitation the activities for which assays are described herein. A protein may be useful in the treatment of various immune deficiencies and disorders (including severe combined immunodeficiency (SCID)), e.g., in regulating (up or down) growth and proliferation of T and/or B lymphocytes, as well as effecting the cytolytic activity of NK cells and other cell populations. These immune deficiencies may be genetic or be caused by viral (e.g., HIV) as well as bacterial or fungal infections, or may result from autoimmune disorders. More specifically, infectious diseases causes by viral, bacterial, fungal or other infection may be treatable using a protein of the present invention, including infections by HIV, hepatitis viruses, herpesviruses, mycobacteria, Leishmania spp., malaria spp. and various fungal infections such as candidiasis. Of course, in this regard, a protein of the present invention may also be useful where a boost to the immune system generally may be desirable, i.e., in the treatment of cancer.

[0079] Autoimmune disorders which may be treated using a protein of the present invention include, for example, connective tissue disease, multiple sclerosis, systemic lupus erythematosus, rheumatoid arthritis, autoimmune pulmonary inflammation, Guillain-Barre syndrome, autoimmune thyroiditis, insulin dependent diabetes mellitis, myasthenia gravis, graft-versus-host disease and autoimmune inflammatory eye disease. Such a protein of the present invention may also to be useful in the treatment of allergic reactions and conditions, such as asthma (particularly allergic asthma) or other respiratory problems. Other conditions, in which immune suppression is desired (including, for example, organ transplantation), may also be treatable using a protein of the present invention.

[0080] Using the proteins of the invention it may also be possible to immune responses, in a number of ways. Down regulation may be in the form of inhibiting or blocking an immune response already in progress or may involve preventing the induction of an immune response. The functions of activated T cells may be inhibited by suppressing T cell responses or by inducing specific tolerance in T cells, or both. Immunosuppression of T cell responses is generally an active, non-antigen- specific, process which requires continuous exposure of the T cells to the suppressive agent. Tolerance, which involves inducing non-responsiveness or anergy in T cells, is distinguishable from immunosuppression in that it is generally antigen-specific and persists after exposure to the tolerizing agent has ceased. Operationally, tolerance can be demonstrated by the lack of a T cell response upon reexposure to specific antigen in the absence of the tolerizing agent.

[0081] Down regulating or preventing one or more antigen functions (including without limitation B lymphocyte antigen functions (such as, for example, B7)), e.g., preventing high level lymphokine synthesis by activated T cells, will be useful in situations of tissue, skin and organ transplantation and in graft-versus-host disease (GVHD). For example, blockage of T cell function should result in reduced tissue destruction in tissue transplantation. Typically, in tissue transplants, rejection of the transplant is initiated through its recognition as foreign by T cells, followed by an immune reaction that destroys the transplant. The administration of a molecule which inhibits or blocks interaction of a B7 lymphocyte antigen with its natural ligand(s) on immune cells (such as a soluble, monomeric form of a peptide having B7-2 activity alone or in conjunction with a monomeric form of a peptide having an activity of another B lymphocyte antigen (e.g., B7-1, B7-3) or blocking antibody), prior to transplantation can lead to the binding of the molecule to the natural ligand(s) on the immune cells without transmitting the corresponding costimulatory signal. Blocking B lymphocyte antigen function in this matter prevents cytokine synthesis by immune cells, such as T cells, and thus acts as an immunosuppressant. Moreover, the lack of costimulation may also be sufficient to anergize the T cells, thereby inducing tolerance in a subject. Induction of long-term tolerance by B lymphocyte antigen-blocking reagents may avoid the necessity of repeated administration of these blocking reagents. To achieve sufficient immunosuppression or tolerance in a subject, it may also be necessary to block the function of a combination of B lymphocyte antigens.

[0082] The efficacy of particular blocking reagents in preventing organ transplant rejection or GVHD can be assessed using animal models that are predictive of efficacy in humans. Examples of appropriate systems which can be used include allogeneic cardiac grafts in rats and xenogeneic pancreatic islet cell grafts in mice, both of which have been used to examine the immunosuppressive effects of CTLA4Ig fusion proteins in vivo as described in Lenschow et al., Science 257:789-792 (1992) and Turka et al., Proc. Natl. Acad. Sci USA, 89:11102-11105 (1992). In addition, murine models of GVHD (see Paul ed., Fundamental Immunology, Raven Press, New York, 1989, pp. 846-847) can be used to determine the effect of blocking B lymphocyte antigen function in vivo on the development of that disease.

[0083] Blocking antigen function may also be therapeutically useful for treating autoimmune diseases. Many autoimmune disorders are the result of inappropriate activation of T cells that are reactive against self tissue and which promote the production of cytokines and autoantibodies involved in the pathology of the diseases. Preventing the activation of autoreactive T cells may reduce or eliminate disease symptoms. Administration of reagents which block costimulation of T cells by disrupting receptor:ligand interactions of B lymphocyte antigens can be used to inhibit T cell activation and prevent production of autoantibodies or T cell-derived cytokines which may be involved in the disease process. Additionally, blocking reagents may induce antigen-specific tolerance of autoreactive T cells which could lead to long-term relief from the disease. The efficacy of blocking reagents in preventing or alleviating autoimmune disorders can be determined using a number of well-characterized animal models of human autoimmune diseases. Examples include murine experimental autoimmune encephalitis, systemic lupus erythmatosis in MRL/lpr/lpr mice or NZB hybrid mice, murine autoimmune collagen arthritis, diabetes mellitus in NOD mice and BB rats, and murine experimental myasthenia gravis (see Paul ed., Fundamental Immunology, Raven Press, New York, 1989, pp. 840-856).

[0084] Upregulation of an antigen function (preferably a B lymphocyte antigen function), as a means of up regulating immune responses, may also be useful in therapy. Upregulation of immune responses may be in the form of enhancing an existing immune response or eliciting an initial immune response. For example, enhancing an immune response through stimulating B lymphocyte antigen function may be useful in cases of viral infection. In addition, systemic viral diseases such as influenza, the common cold, and encephalitis might be alleviated by the administration of stimulatory forms of B lymphocyte antigens systemically.

[0085] Alternatively, anti-viral immune responses may be enhanced in an infected patient by removing T cells from the patient, costimulating the T cells in vitro with viral antigen-pulsed APCs either expressing a peptide of the present invention or together with a stimulatory form of a soluble peptide of the present invention and reintroducing the in vitro activated T cells into the patient. Another method of enhancing anti-viral immune responses would be to isolate infected cells from a patient, transfect them with a nucleic acid encoding a protein of the present invention as described herein such that the cells express all or a portion of the protein on their surface, and reintroduce the transfected cells into the patient. The infected cells would now be capable of delivering a costimulatory signal to, and thereby activate, T cells in vivo.

[0086] In another application, up regulation or enhancement of antigen function (preferably B lymphocyte antigen function) may be useful in the induction of tumor immunity. Tumor cells (e.g., sarcoma, melanoma, lymphoma, leukemia, neuroblastoma, carcinoma) transfected with a nucleic acid encoding at least one peptide of the present invention can be administered to a subject to overcome tumor-specific tolerance in the subject. If desired, the tumor cell can be transfected to express a combination of peptides. For example, tumor cells obtained from a patient can be transfected ex vivo with an expression vector directing the expression of a peptide having B7-2-like activity alone, or in conjunction with a peptide having B7-1-like activity and/or B7-3-like activity. The transfected tumor cells are returned to the patient to result in expression of the peptides on the surface of the transfected cell. Alternatively, gene therapy techniques can be used to target a tumor cell for transfection in vivo.

[0087] The presence of the peptide of the present invention having the activity of a B lymphocyte antigen(s) on the surface of the tumor cell provides the necessary costimulation signal to T cells to induce a T cell mediated immune response against the transfected tumor cells. In addition, tumor cells which lack MHC class I or MHC class II molecules, or which fail to reexpress sufficient amounts of MHC class I or MHC class II molecules, can be transfected with nucleic acid encoding an or a portion of (e.g., a cytoplasmic-domain truncated portion) of an MHC class I α chain protein and β₂ microglobulin protein or an MHC class II α chain protein and an MHC class II β chain protein to thereby express MHC class I or MHC class II proteins on the cell surface. Expression of the appropriate class I or class II MHC in conjunction with a peptide having the activity of a B lymphocyte antigen (e.g., B7-1, B7-2, B7-3) induces a T cell mediated immune response against the transfected tumor cell. Optionally, a gene encoding an antisense construct which blocks expression of an MHC class II associated protein, such as the invariant chain, can also be cotransfected with a DNA encoding a peptide having the activity of a B lymphocyte antigen to promote presentation of tumor associated antigens and induce tumor specific immunity. Thus, the induction of a T cell mediated immune response in a human subject may be sufficient to overcome tumor-specific tolerance in the subject.

[0088] The activity of a protein of the invention may, among other means, be measured by the following methods:

[0089] Suitable assays for thymocyte or splenocyte cytotoxicity include, without limitation, those described in: Current Protocols in Immunology, Ed by J. E. Coligan, A. M. Kruisbeek, D. H. Margulies, E. M. Shevach, W Strober, Pub. Greene Publishing Associates and Wiley-Interscience (Chapter 3, In Vitro assays for Mouse Lymphocyte Function 3.1-3.19; Chapter 7, Immunologic studies in Humans); Herrmann et al., Proc. Natl. Acad. Sci. USA 78:2488-2492, 1981; Herrmann et al., J. Immunol. 128:1968-1974, 1982; Handa et al., J. Immunol. 135:1564-1572, 1985; Takai et al., J. Immunol. 137:3494-3500, 1986; Takai et al., J. Immunol. 140:508-512, 1988; Herrmann et al., Proc. Natl. Acad. Sci. USA 78:2488-2492, 1981; Herrmann et al., J. Immunol. 128:1968-1974, 1982; Handa et al., J. Immunol. 135:1564-1572, 1985; Takai et al., J. Immunol. 137:3494-3500, 1986; Bowmanet al., J. Virology 61:1992-1998; Takai et al., J. Immunol. 140:508-512, 1988; Bertagnolli et al., Cellular Immunology 133:327-341, 1991; Brown et al., J. Immunol. 153:3079-3092, 1994.

[0090] Assays for T-cell-dependent immunoglobulin responses and isotype switching (which will identify, among others, proteins that modulate T-cell dependent antibody responses and that affect Th1/Th2 profiles) include, without limitation, those described in: Maliszewski, J. Immunol. 144:3028-3033, 1990; and Assays for B cell function: In vitro antibody production, Mond, J. J. and Brunswick, M. In Current Protocols in Immunology. J. E. e.a. Coligan eds. Vol 1 pp. 3.8.1-3.8.16, John Wiley and Sons, Toronto. 1994.

[0091] Mixed lymphocyte reaction (MLR) assays (which will identify, among others, proteins that generate predominantly Th1 and CTL responses) include, without limitation, those described in: Current Protocols in Immunology, Ed by J. E. Coligan, A. M. Kruisbeek, D. H. Margulies, E. M. Shevach, W Strober, Pub. Greene Publishing Associates and Wiley-Interscience (Chapter 3, In Vitro assays for Mouse Lymphocyte Function 3.1-3.19; Chapter 7, Immunologic studies in Humans); Takai et al., J. Immunol. 137:3494-3500, 1986; Takai et al., J. Immunol. 140:508-512, 1988; Bertagnolli et al., J. Immunol. 149:3778-3783, 1992.

[0092] Dendritic cell-dependent assays (which will identify, among others, proteins expressed by dendritic cells that activate naive T-cells) include, without limitation, those described in: Guery et al., J. Immunol. 134:536-544, 1995; Inaba et al., Journal of Experimental Medicine 173:549-559, 1991; Macatonia et al., Journal of Immunology 154:5071-5079, 1995; Porgador et al., Journal of Experimental Medicine 182:255-260, 1995; Nair et al., Journal of Virology 67:4062-4069, 1993; Huang et al., Science 264:961-965, 1994; Macatonia et al., Journal of Experimental Medicine 169:1255-1264, 1989; Bhardwaj et al., Journal of Clinical Investigation 94:797-807, 1994; and Inaba et al., Journal of Experimental Medicine 172:631-640, 1990.

[0093] Assays for lymphocyte survival/ apoptosis (which will identify, among others, proteins that prevent apoptosis after superantigen induction and proteins that regulate lymphocyte homeostasis) include, without limitation, those described in: Darzynkiewicz et al., Cytometry 13:795-808, 1992; Gorczyca et al., Leukemia 7:659-670, 1993; Gorczyca et al., Cancer Research 53:1945-1951, 1993; Itoh et al., Cell 66:233-243, 1991; Zacharchuk, Journal of Immunology 145:4037-4045, 1990; Zamai et al., Cytometry 14:891-897, 1993; Gorczyca et al., International Journal of Oncology 1:639-648, 1992.

[0094] Assays for proteins that influence early steps of T-cell commitment and development include, without limitation, those described in: Antica et al., Blood 84:111-117, 1994; Fine et al., Cellular Immunology 155:111-122, 1994; Galy et al., Blood 85:2770-2778, 1995; Toki et al., Proc. Nat. Acad Sci. USA 88:7548-7551, 1991.

[0095] Hematopoiesis Regulating Activity

[0096] A protein of the present invention may be useful in regulation of hematopoiesis and, consequently, in the treatment of myeloid or lymphoid cell deficiencies. Even marginal biological activity in support of colony forming cells or of factor-dependent cell lines indicates involvement in regulating hematopoiesis, e.g. in supporting the growth and proliferation of erythroid progenitor cells alone or in combination with other cytokines, thereby indicating utility, for example, in treating various anemias or for use in conjunction with irradiation/ chemotherapy to stimulate the production of erythroid precursors and/or erythroid cells; in supporting the growth and proliferation of myeloid cells such as granulocytes and monocytes/macrophages (i.e., traditional CSF activity) useful, for example, in conjunction with chemotherapy to prevent or treat consequent myelo-suppression; in supporting the growth and proliferation of megakaryocytes and consequently of platelets thereby allowing prevention or treatment of various platelet disorders such as thrombocytopenia, and generally for use in place of or complimentary to platelet transfusions; and/or in supporting the growth and proliferation of hematopoietic stem cells which are capable of maturing to any and all of the above-mentioned hematopoietic cells and therefore find therapeutic utility in various stem cell disorders (such as those usually treated with transplantation, including, without limitation, aplastic anemia and paroxysmal nocturnal hemoglobinuria), as well as in repopulating the stem cell compartment post irradiation/chemotherapy, either in- vivo or ex-vivo (i.e., in conjunction with bone marrow transplantation or with peripheral progenitor cell transplantation (homologous or heterologous)) as normal cells or genetically manipulated for gene therapy.

[0097] The activity of a protein of the invention may, among other means, be measured by the following methods:

[0098] Suitable assays for proliferation and differentiation of various hematopoietic lines are cited above.

[0099] Assays for embryonic stem cell differentiation (which will identify, among others, proteins that influence embryonic differentiation hematopoiesis) include, without limitation, those described in: Johansson et al. Cellular Biology 15:141-151, 1995; Keller et al., Molecular and Cellular Biology 13:473-486, 1993; McClanahan et al., Blood 81:2903-2915, 1993.

[0100] Assays for stem cell survival and differentiation (which will identify, among others, proteins that regulate lympho-hematopoiesis) include, without limitation, those described in: Methylcellulose colony forming assays, Freshney, M. G. In Culture of Hematopoietic Cells. R. I. Freshney, et al. eds. Vol pp. 265-268, Wiley-Liss, Inc., New York, N.Y. 1994; Hirayama et al., Proc. Natl. Acad. Sci. USA 89:5907-5911, 1992; Primitive hematopoietic colony forming cells with high proliferative potential, McNiece, I. K. and Briddell, R. A. In Culture of Hematopoietic Cells. R. I. Freshney, et al. eds. Vol pp. 23-39, Wiley-Liss, Inc., New York, N.Y. 1994; Neben et al., Experimental Hematology 22:353-359, 1994; Cobblestone area forming cell assay, Ploemacher, R. E. In Culture of Hematopoietic Cells. R. I. Freshney, et al. eds. Vol pp. 1-21, Wiley-Liss, Inc., New York, N.Y. 1994; Long term bone marrow cultures in the presence of stromal cells, Spooncer, E., Dexter, M. and Allen, T. In Culture of Hematopoietic Cells. R. I. Freshney, et al. eds. Vol pp. 163-179, Wiley-Liss, Inc., New York, N.Y. 1994; Long term culture initiating cell assay, Sutherland, H. J. In Culture of Hematopoietic Cells. R. I. Freshney, et al. eds. Vol pp. 139-162, Wiley-Liss, Inc., New York, N.Y. 1994.

[0101] Tissue Growth Activity

[0102] A protein of the present invention also may have utility in compositions used for bone, cartilage, tendon, ligament and/or nerve tissue growth or regeneration, as well as for wound healing and tissue repair and replacement, and in the treatment of burns, incisions and ulcers.

[0103] A protein of the present invention, which induces cartilage and/or bone growth in circumstances where bone is not normally formed, has application in the healing of bone fractures and cartilage damage or defects in humans and other animals. Such a preparation employing a protein of the invention may have prophylactic use in closed as well as open fracture reduction and also in the improved fixation of artificial joints. De novo bone formation induced by an osteogenic agent contributes to the repair of congenital, trauma induced, or oncologic resection induced craniofacial defects, and also is useful in cosmetic plastic surgery.

[0104] A protein of this invention may also be used in the treatment of periodontal disease, and in other tooth repair processes. Such agents may provide an environment to attract bone-forming cells, stimulate growth of bone-forming cells or induce differentiation of progenitors of bone-forming cells. A protein of the invention may also be useful in the treatment of osteoporosis or osteoarthritis, such as through stimulation of bone and/or cartilage repair or by blocking inflammation or processes of tissue destruction (collagenase activity, osteoclast activity, etc.) mediated by inflammatory processes.

[0105] Another category of tissue regeneration activity that may be attributable to the protein of the present invention is tendon/ligament formation. A protein of the present invention, which induces tendon/ligament-like tissue or other tissue formation in circumstances where such tissue is not normally formed, has application in the healing of tendon or ligament tears, deformities and other tendon or ligament defects in humans and other animals. Such a preparation employing a tendon/ligament-like tissue inducing protein may have prophylactic use in preventing damage to tendon or ligament tissue, as well as use in the improved fixation of tendon or ligament to bone or other tissues, and in repairing defects to tendon or ligament tissue. De novo tendon/ligament-like tissue formation induced by a composition of the present invention contributes to the repair of congenital, trauma induced, or other tendon or ligament defects of other origin, and is also useful in cosmetic plastic surgery for attachment or repair of tendons or ligaments. The compositions of the present invention may provide an environment to attract tendon- or ligament-forming cells, stimulate growth of tendon- or ligament-forming cells, induce differentiation of progenitors of tendon- or ligament-forming cells, or induce growth of tendon/ligament cells or progenitors ex vivo for return in vivo to effect tissue repair. The compositions of the invention may also be useful in the treatment of tendinitis, carpal tunnel syndrome and other tendon or ligament defects. The compositions may also include an appropriate matrix and/or sequestering agent as a carrier as is well known in the art.

[0106] The protein of the present invention may also be useful for proliferation of neural cells and for regeneration of nerve and brain tissue, i.e. for the treatment of central and peripheral nervous system diseases and neuropathies, as well as mechanical and traumatic disorders, which involve degeneration, death or trauma to neural cells or nerve tissue. More specifically, a protein may be used in the treatment of diseases of the peripheral nervous system, such as peripheral nerve injuries, peripheral neuropathy and localized neuropathies, and central nervous system diseases, such as Alzheimer's, Parkinson's disease, Huntington's disease, amyotrophic lateral sclerosis, and Shy-Drager syndrome. Further conditions which may be treated in accordance with the present invention include mechanical and traumatic disorders, such as spinal cord disorders, head trauma and cerebrovascular diseases such as stroke. Peripheral neuropathies resulting from chemotherapy or other medical therapies may also be treatable using a protein of the invention.

[0107] Proteins of the invention may also be useful to promote better or faster closure of non-healing wounds, including without limitation pressure ulcers, ulcers associated with vascular insufficiency, surgical and traumatic wounds, and the like.

[0108] It is expected that a protein of the present invention may also exhibit activity for generation or regeneration of other tissues, such as organs (including, for example, pancreas, liver, intestine, kidney, skin, endothelium), muscle (smooth, skeletal or cardiac) and vascular (including vascular endothelium) tissue, or for promoting the growth of cells comprising such tissues. Part of the desired effects may be by inhibition or modulation of fibrotic scarring to allow normal tissue to regenerate. A protein of the invention may also exhibit angiogenic activity.

[0109] A protein of the present invention may also be useful for gut protection or regeneration and treatment of lung or liver fibrosis, reperfusion injury in various tissues, and conditions resulting from systemic cytokine damage.

[0110] A protein of the present invention may also be useful for promoting or inhibiting differentiation of tissues described above from precursor tissues or cells; or for inhibiting the growth of tissues described above.

[0111] The activity of a protein of the invention may, among other means, be measured by the following methods:

[0112] Assays for tissue generation activity include, without limitation, those described in: International Patent Publication No. WO95/16035 (bone, cartilage, tendon); International Patent Publication No. WO95/05846 (nerve, neuronal); International Patent Publication No. WO91/07491 (skin, endothelium).

[0113] Assays for wound healing activity include, without limitation, those described in: Winter, Epidermal Wound Healing, pps. 71-112 (Maibach, HI and Rovee, DT, eds.), Year Book Medical Publishers, Inc., Chicago, as modified by Eaglstein and Mertz, J. Invest. Dermatol 71:382-84 (1978).

[0114] Activin/Inhibin Activity

[0115] A protein of the present invention may also exhibit activin- or inhibin-related activities. Inhibins are characterized by their ability to inhibit the release of follicle stimulating hormone (FSH), while activins and are characterized by their ability to stimulate the release of follicle stimulating hormone (FSH). Thus, a protein of the present invention, alone or in heterodimers with a member of the inhibin α family, may be useful as a contraceptive based on the ability of inhibins to decrease fertility in female mammals and decrease spermatogenesis in male mammals. Administration of sufficient amounts of other inhibins can induce infertility in these mammals. Alternatively, the protein of the invention, as a homodimer or as a heterodimer with other protein subunits of the inhibin-β group, may be useful as a fertility inducing therapeutic, based upon the ability of activin molecules in stimulating FSH release from cells of the anterior pituitary. See, for example, U.S. Pat. No. 4,798,885. A protein of the invention may also be useful for advancement of the onset of fertility in sexually immature mammals, so as to increase the lifetime reproductive performance of domestic animals such as cows, sheep and pigs.

[0116] The activity of a protein of the invention may, among other means, be measured by the following methods:

[0117] Assays for activin/inhibin activity include, without limitation, those described in: Vale et al., Endocrinology 91:562-572, 1972; Ling et al., Nature 321:779-782, 1986; Vale et al., Nature 321:776-779, 1986; Mason et al., Nature 318:659-663, 1985; Forage et al., Proc. Natl. Acad. Sci. USA 83:3091-3095, 1986.

[0118] Chemotactic/Chemokinetic Activity

[0119] A protein of the present invention may have chemotactic or chemokinetic activity (e.g., act as a chemokine) for mammalian cells, including, for example, monocytes, fibroblasts, neutrophils, T-cells, mast cells, eosinophils, epithelial and/or endothelial cells. Chemotactic and chemokinetic proteins can be used to mobilize or attract a desired cell population to a desired site of action. Chemotactic or chemokinetic proteins provide particular advantages in treatment of wounds and other trauma to tissues, as well as in treatment of localized infections. For example, attraction of lymphocytes, monocytes or neutrophils to tumors or sites of infection may result in improved immune responses against the tumor or infecting agent.

[0120] A protein or peptide has chemotactic activity for a particular cell population if it can stimulate, directly or indirectly, the directed orientation or movement of such cell population. Preferably, the protein or peptide has the ability to directly stimulate directed movement of cells. Whether a particular protein has chemotactic activity for a population of cells can be readily determined by employing such protein or peptide in any known assay for cell chemotaxis.

[0121] The activity of a protein of the invention may, among other means, be measured by the following methods:

[0122] Assays for chemotactic activity (which will identify proteins that induce or prevent chemotaxis) consist of assays that measure the ability of a protein to induce the migration of cells across a membrane as well as the ability of a protein to induce the adhesion of one cell population to another cell population. Suitable assays for movement and adhesion include, without limitation, those described in: Current Protocols in Immunology, Ed by J. E. Coligan, A. M. Kruisbeek, D. H. Margulies, E. M. Shevach, W. Strober, Pub. Greene Publishing Associates and Wiley-Interscience (Chapter 6.12, Measurement of alpha and beta Chemokines 6.12.1-6.12.28; Taub et al. J. Clin. Invest. 95:1370-1376, 1995; Lind et al. APMIS 103:140-146, 1995; Muller et al Eur. J. Immunol. 25: 1744-1748; Gruber et al. J. of Immunol. 152:5860-5867, 1994; Johnston et al. J. of Immunol. 153: 1762-1768, 1994.

[0123] Hemostatic and Thrombolytic Activity

[0124] A protein of the invention may also exhibit hemostatic or thrombolytic activity. As a result, such a protein is expected to be useful in treatment of various coagulation disorders (including hereditary disorders, such as hemophilias) or to enhance coagulation and other hemostatic events in treating wounds resulting from trauma, surgery or other causes. A protein of the invention may also be useful for dissolving or inhibiting formation of thromboses and for treatment and prevention of conditions resulting therefrom (such as, for example, infarction of cardiac and central nervous system vessels (e.g., stroke).

[0125] The activity of a protein of the invention may, among other means, be measured by the following methods:

[0126] Assay for hemostatic and thrombolytic activity include, without limitation, those described in: Linet et al., J. Clin. Pharmacol. 26:131-140, 1986; Burdick et al., Thrombosis Res. 45:413-419, 1987; Humphrey et al., Fibrinolysis 5:71-79 (1991); Schaub, Prostaglandins 35:467-474, 1988.

[0127] Receptor/Ligand Activity

[0128] A protein of the present invention may also demonstrate activity as receptors, receptor ligands or inhibitors or agonists of receptor/ligand interactions. Examples of such receptors and ligands include, without limitation, cytokine receptors and their ligands, receptor kinases and their ligands, receptor phosphatases and their ligands, receptors involved in cell-cell interactions and their ligands (including without limitation, cellular adhesion molecules (such as selectins, integrins and their ligands) and receptor/ligand pairs involved in antigen presentation, antigen recognition and development of cellular and humoral immune responses). Receptors and ligands are also useful for screening of potential peptide or small molecule inhibitors of the relevant receptor/ligand interaction. A protein of the present invention (including, without limitation, fragments of receptors and ligands) may themselves be useful as inhibitors of receptor/ligand interactions.

[0129] The activity of a protein of the invention may, among other means, be measured by the following methods:

[0130] Suitable assays for receptor-ligand activity include without limitation those described in:Current Protocols in Immunology, Ed by J. E. Coligan, A. M. Kruisbeek, D. H. Margulies, E. M. Shevach, W. Strober, Pub. Greene Publishing Associates and Wiley-interscience (Chapter 7.28, Measurement of Cellular Adhesion under static conditions 7.28.1-7.28.22), Takai et al., Proc. Natl. Acad. Sci. USA 84:6864-6868, 1987; Bierer et al., J. Exp. Med. 168:1145-1156, 1988; Rosenstein et al., J. Exp. Med. 169:149-160 1989; Stoltenborg et al., J. Immunol. Methods 175:59-68, 1994; Stitt et al., Cell 80:661-670, 1995.

[0131] Anti-Inflammatory Activity

[0132] Proteins of the present invention may also exhibit anti-inflammatory activity. The anti-inflammatory activity may be achieved by providing a stimulus to cells involved in the inflammatory response, by inhibiting or promoting cell-cell interactions (such as, for example, cell adhesion), by inhibiting or promoting chemotaxis of cells involved in the inflammatory process, inhibiting or promoting cell extravasation, or by stimulating or suppressing production of other factors which more directly inhibit or promote an inflammatory response. Proteins exhibiting such activities can be used to treat inflammatory conditions including chronic or acute conditions), including without limitation inflammation associated with infection (such as septic shock, sepsis or systemic inflammatory response syndrome (SIRS)), ischemia-reperfusion injury, endotoxin lethality, arthritis, complement-mediated hyperacute rejection, nephritis, cytokine or chemokine-induced lung injury, inflammatory bowel disease, Crohn's disease or resulting from over production of cytokines such as TNF or IL-1. Proteins of the invention may also be useful to treat anaphylaxis and hypersensitivity to an antigenic substance or material.

[0133] Tumor Inhibition Activity

[0134] In addition to the activities described above for immunological treatment or prevention of tumors, a protein of the invention may exhibit other anti-tumor activities. A protein may inhibit tumor growth directly or indirectly (such as, for example, via ADCC). A protein may exhibit its tumor inhibitory activity by acting on tumor tissue or tumor precursor tissue, by inhibiting formation of tissues necessary to support tumor growth (such as, for example, by inhibiting angiogenesis), by causing production of other factors, agents or cell types which inhibit tumor growth, or by suppressing, eliminating or inhibiting factors, agents or cell types which promote tumor growth.

[0135] Other Activities

[0136] A protein of the invention may also exhibit one or more of the following additional activities or effects: inhibiting the growth, infection or function of, or killing, infectious agents, including, without limitation, bacteria, viruses, fungi and other parasites; effecting (suppressing or enhancing) bodily characteristics, including, without limitation, height, weight, hair color, eye color, skin, fat to lean ratio or other tissue pigmentation, or organ or body part size or shape (such as, for example, breast augmentation or diminution, change in bone form or shape); effecting biorhythms or caricadic cycles or rhythms; effecting the fertility of male or female subjects; effecting the metabolism, catabolism, anabolism, processing, utilization, storage or elimination of dietary fat, lipid, protein, carbohydrate, vitamins, minerals, cofactors or other nutritional factors or component(s); effecting behavioral characteristics, including, without limitation, appetite, libido, stress, cognition (including cognitive disorders), depression (including depressive disorders) and violent behaviors; providing analgesic effects or other pain reducing effects; promoting differentiation and growth of embryonic stem cells in lineages other than hematopoietic lineages; hormonal or endocrine activity; in the case of enzymes, correcting deficiencies of the enzyme and treating deficiency-related diseases; treatment of hyperproliferative disorders (such as, for example, psoriasis); immunoglobulin-like activity (such as, for example, the ability to bind antigens or complement); and the ability to act as an antigen in a vaccine composition to raise an immune response against such protein or another material or entity which is cross-reactive with such protein.

[0137] Administration and Dosing

[0138] A protein of the present invention (from whatever source derived, including without limitation from recombinant and non-recombinant sources) may be used in a pharmaceutical composition when combined with a pharmaceutically acceptable carrier. Such a composition may also contain (in addition to protein and a carrier) diluents, fillers, salts, buffers, stabilizers, solubilizers, and other materials well known in the art. The term “pharmaceutically acceptable” means a non-toxic material that does not interfere with the effectiveness of the biological activity of the active ingredient(s). The characteristics of the carrier will depend on the route of administration. The pharmaceutical composition of the invention may also contain cytokines, lymphokines, or other hematopoietic factors such as M-CSF, GM-CSF, TNF, IL-1, IL-2, IL-3, IL-4, IL-5, IL-6, IL-7, IL-8, IL-9, IL-10, IL-11, IL-12, IL-13, IL-14, IL-15, IFN, TNF0, TNF1, TNF2, G-CSF, Meg-CSF, thrombopoietin, stem cell factor, and erythropoietin. The pharmaceutical composition may further contain other agents which either enhance the activity of the protein or compliment its activity or use in treatment. Such additional factors and/or agents may be included in the pharmaceutical composition to produce a synergistic effect with protein of the invention, or to minimize side effects. Conversely, protein of the present invention may be included in formulations of the particular cytokine, lymphokine, other hematopoietic factor, thrombolytic or anti-thrombotic factor, or anti-inflammatory agent to minimize side effects of the cytokine, lymphokine, other hematopoietic factor, thrombolytic or anti-thrombotic factor, or anti-inflammatory agent.

[0139] A protein of the present invention may be active in multimers (e.g., heterodimers or homodimers) or complexes with itself or other proteins. As a result, pharmaceutical compositions of the invention may comprise a protein of the invention in such multimeric or complexed form.

[0140] The pharmaceutical composition of the invention may be in the form of a complex of the protein(s) of present invention along with protein or peptide antigens. The protein and/or peptide antigen will deliver a stimulatory signal to both B and T lymphocytes. B lymphocytes will respond to antigen through their surface immunoglobulin receptor. T lymphocytes will respond to antigen through the T cell receptor (TCR) following presentation of the antigen by MHC proteins. MHC and structurally related proteins including those encoded by class I and class II MHC genes on host cells will serve to present the peptide antigen(s) to T lymphocytes. The antigen components could also be supplied as purified MHC-peptide complexes alone or with co-stimulatory molecules that can directly signal T cells. Alternatively antibodies able to bind surface immunolgobulin and other molecules on B cells as well as antibodies able to bind the TCR and other molecules on T cells can be combined with the pharmaceutical composition of the invention.

[0141] The pharmaceutical composition of the invention may be in the form of a liposome in which protein of the present invention is combined, in addition to other pharmaceutically acceptable carriers, with amphipathic agents such as lipids which exist in aggregated form as micelles, insoluble monolayers, liquid crystals, or lamellar layers in aqueous solution. Suitable lipids for liposomal formulation include, without limitation, monoglycerides, diglycerides, sulfatides, lysolecithin, phospholipids, saponin, bile acids, and the like. Preparation of such liposomal formulations is within the level of skill in the art, as disclosed, for example, in U.S. Pat. No. 4,235,871; U.S. Pat. No. 4,501,728; U.S. Pat. No. 4,837,028; and U.S. Pat. No. 4,737,323, all of which are incorporated herein by reference.

[0142] As used herein, the term “therapeutically effective amount” means the total amount of each active component of the pharmaceutical composition or method that is sufficient to show a meaningful patient benefit, i.e., treatment, healing, prevention or amelioration of the relevant medical condition, or an increase in rate of treatment, healing, prevention or amelioration of such conditions. When applied to an individual active ingredient, administered alone, the term refers to that ingredient alone. When applied to a combination, the term refers to combined amounts of the active ingredients that result in the therapeutic effect, whether administered in combination, serially or simultaneously.

[0143] In practicing the method of treatment or use of the present invention, a therapeutically effective amount of protein of the present invention is administered to a mammal having a condition to be treated. Protein of the present invention may be administered in accordance with the method of the invention either alone or in combination with other therapies such as treatments employing cytokines, lymphokines or other hematopoietic factors. When co-administered with one or more cytokines, lymphokines or other hematopoietic factors, protein of the present invention may be administered either simultaneously with the cytokine(s), lymphokine(s), other hematopoietic factor(s), thrombolytic or anti-thrombotic factors, or sequentially. If administered sequentially, the attending physician will decide on the appropriate sequence of administering protein of the present invention in combination with cytokine(s), lymphokine(s), other hematopoietic factor(s), thrombolytic or anti-thrombotic factors.

[0144] Administration of protein of the present invention used in the pharmaceutical composition or to practice the method of the present invention can be carried out in a variety of conventional ways, such as oral ingestion, inhalation, topical application or cutaneous, subcutaneous, intraperitoneal, parenteral or intravenous injection. Intravenous administration to the patient is preferred.

[0145] When a therapeutically effective amount of protein of the present invention is administered orally, protein of the present invention will be in the form of a tablet, capsule, powder, solution or elixir. When administered in tablet form, the pharmaceutical composition of the invention may additionally contain a solid carrier such as a gelatin or an adjuvant. The tablet, capsule, and powder contain from about 5 to 95% protein of the present invention, and preferably from about 25 to 90% protein of the present invention. When administered in liquid form, a liquid carrier such as water, petroleum, oils of animal or plant origin such as peanut oil, mineral oil, soybean oil, or sesame oil, or synthetic oils may be added. The liquid form of the pharmaceutical composition may further contain physiological saline solution, dextrose or other saccharide solution, or glycols such as ethylene glycol, propylene glycol or polyethylene glycol. When administered in liquid form, the pharmaceutical composition contains from about 0.5 to 90% by weight of protein of the present invention, and preferably from about 1 to 50% protein of the present invention.

[0146] When a therapeutically effective amount of protein of the present invention is administered by intravenous, cutaneous or subcutaneous injection, protein of the present invention will be in the form of a pyrogen-free, parenterally acceptable aqueous solution. The preparation of such parenterally acceptable protein solutions, having due regard to pH, isotonicity, stability, and the like, is within the skill in the art. A preferred pharmaceutical composition for intravenous, cutaneous, or subcutaneous injection should contain, in addition to protein of the present invention, an isotonic vehicle such as Sodium Chloride Injection, Ringer's Injection, Dextrose Injection, Dextrose and Sodium Chloride Injection, Lactated Ringer's Injection, or other vehicle as known in the art. The pharmaceutical composition of the present invention may also contain stabilizers, preservatives, buffers, antioxidants, or other additives known to those of skill in the art.

[0147] The amount of protein of the present invention in the pharmaceutical composition of the present invention will depend upon the nature and severity of the condition being treated, and on the nature of prior treatments which the patient has undergone. Ultimately, the attending physician will decide the amount of protein of the present invention with which to treat each individual patient. Initially, the attending physician will administer low doses of protein of the present invention and observe the patient's response. Larger doses of protein of the present invention may be administered until the optimal therapeutic effect is obtained for the patient, and at that point the dosage is not increased further. It is contemplated that the various pharmaceutical compositions used to practice the method of the present invention should contain about 0.01 μg to about 100 mg (preferably about 0.1 ng to about 10 mg, more preferably about 0.1 μg to about 1 mg) of protein of the present invention per kg body weight.

[0148] The duration of intravenous therapy using the pharmaceutical composition of the present invention will vary, depending on the severity of the disease being treated and the condition and potential idiosyncratic response of each individual patient. It is contemplated that the duration of each application of the protein of the present invention will be in the range of 12 to 24 hours of continuous intravenous administration. Ultimately the attending physician will decide on the appropriate duration of intravenous therapy using the pharmaceutical composition of the present invention.

[0149] Protein of the invention may also be used to immunize animals to obtain polyclonal and monoclonal antibodies which specifically react with the protein. Such antibodies may be obtained using either the entire protein or fragments thereof as an immunogen. The peptide immunogens additionally may contain a cysteine residue at the carboxyl terminus, and are conjugated to a hapten such as keyhole limpet hemocyanin (KLH). Methods for synthesizing such peptides are known in the art, for example, as in R. P. Merrifield, J. Amer.Chem.Soc. A5, 2149-2154 (1963); J. L. Krstenansky, et al., FEBS Lett. 211, 10 (1987). Monoclonal antibodies binding to the protein of the invention may be useful diagnostic agents for the immunodetection of the protein. Neutralizing monoclonal antibodies binding to the protein may also be useful therapeutics for both conditions associated with the protein and also in the treatment of some forms of cancer where abnormal expression of the protein is involved. In the case of cancerous cells or leukemic cells, neutralizing monoclonal antibodies against the protein may be useful in detecting and preventing the metastatic spread of the cancerous cells, which may be mediated by the protein.

[0150] For compositions of the present invention which are useful for bone, cartilage, tendon or ligament regeneration, the therapeutic method includes administering the composition topically, systematically, or locally as an implant or device. When administered, the therapeutic composition for use in this invention is, of course, in a pyrogen-free, physiologically acceptable form. Further, the composition may desirably be encapsulated or injected in a viscous form for delivery to the site of bone, cartilage or tissue damage. Topical administration may be suitable for wound healing and tissue repair. Therapeutically useful agents other than a protein of the invention which may also optionally be included in the composition as described above, may alternatively or additionally, be administered simultaneously or sequentially with the composition in the methods of the invention. Preferably for bone and/or cartilage formation, the composition would include a matrix capable of delivering the protein-containing composition to the site of bone and/or cartilage damage, providing a structure for the developing bone and cartilage and optimally capable of being resorbed into the body. Such matrices may be formed of materials presently in use for other implanted medical applications.

[0151] The choice of matrix material is based on biocompatibility, biodegradability, mechanical properties, cosmetic appearance and interface properties. The particular application of the compositions will define the appropriate formulation. Potential matrices for the compositions may be biodegradable and chemically defined calcium sulfate, tricalciumphosphate, hydroxyapatite, polylactic acid, polyglycolic acid and polyanhydrides. Other potential materials are biodegradable and biologically well-defined, such as bone or dermal collagen. Further matrices are comprised of pure proteins or extracellular matrix components. Other potential matrices are nonbiodegradable and chemically defined, such as sintered hydroxapatite, bioglass, aluminates, or other ceramics. Matrices may be comprised of combinations of any of the above mentioned types of material, such as polylactic acid and hydroxyapatite or collagen and tricalciumphosphate. The bioceramics may be altered in composition, such as in calcium-aluminate-phosphate and processing to alter pore size, particle size, particle shape, and biodegradability.

[0152] Presently preferred is a 50:50 (mole weight) copolymer of lactic acid and glycolic acid in the form of porous particles having diameters ranging from 150 to 800 microns. In some applications, it will be useful to utilize a sequestering agent, such as carboxymethyl cellulose or autologous blood clot, to prevent the protein compositions from disassociating from the matrix.

[0153] A preferred family of sequestering agents is cellulosic materials such as alkylcelluloses (including hydroxyalkylcelluloses), including methylcellulose, ethylcellulose, hydroxyethylcellulose, hydroxypropylcellulose, hydroxypropyl-methylcellulose, and carboxymethylcellulose, the most preferred being cationic salts of carboxymethylcellulose (CMC). Other preferred sequestering agents include hyaluronic acid, sodium alginate, poly(ethylene glycol), polyoxyethylene oxide, carboxyvinyl polymer and poly(vinyl alcohol). The amount of sequestering agent useful herein is 0.5-20 wt %, preferably 1-10 wt % based on total formulation weight, which represents the amount necessary to prevent desorbtion of the protein from the polymer matrix and to provide appropriate handling of the composition, yet not so much that the progenitor cells are prevented from infiltrating the matrix, thereby providing the protein the opportunity to assist the osteogenic activity of the progenitor cells.

[0154] In further compositions, proteins of the invention may be combined with other agents beneficial to the treatment of the bone and/or cartilage defect, wound, or tissue in question. These agents include various growth factors such as epidermal growth factor (EGF), platelet derived growth factor (PDGF), transforming growth factors (TGF-α and TGF-β), and insulin-like growth factor (IGF).

[0155] The therapeutic compositions are also presently valuable for veterinary applications. Particularly domestic animals and thoroughbred horses, in addition to humans, are desired patients for such treatment with proteins of the present invention.

[0156] The dosage regimen of a protein-containing pharmaceutical composition to be used in tissue regeneration will be determined by the attending physician considering various factors which modify the action of the proteins, e.g., amount of tissue weight desired to be formed, the site of damage, the condition of the damaged tissue, the size of a wound, type of damaged tissue (e.g., bone), the patient's age, sex, and diet, the severity of any infection, time of administration and other clinical factors. The dosage may vary with the type of matrix used in the reconstitution and with inclusion of other proteins in the pharmaceutical composition. For example, the addition of other known growth factors, such as IGF I (insulin like growth factor I), to the final composition, may also effect the dosage. Progress can be monitored by periodic assessment of tissue/bone growth and/or repair, for example, X-rays, histomorphometric determinations and tetracycline labeling.

[0157] Polynucleotides of the present invention can also be used for gene therapy. Such polynucleotides can be introduced either in vivo or ex vivo into cells for expression in a mammalian subject. Polynucleotides of the invention may also be administered by other known methods for introduction of nucleic acid into a cell or organism (including, without limitation, in the form of viral vectors or naked DNA).

[0158] Cells may also be cultured ex vivo in the presence of proteins of the present invention in order to proliferate or to produce a desired effect on or activity in such cells. Treated cells can then be introduced in vivo for therapeutic purposes.

[0159] Patent and literature references cited herein are incorporated by reference as if fully set forth.

The application's sequence listing, which the Patent Office published only in electronic form, follows.

SEQUENCE LISTING (629 sequences)

SEQ ID NO: 1 - DNA, 1641 bp, Homo sapiens
cacagctgggatacccaacctacaactttatgatgtgaaaactgggacatgtttgaaatctttcatccagaaaaaaatgcaaaattggtgtccatcctggtcagaagatgaaactctttgtgcccgcaatgttaacaatgaagttcacttctttgaaaacaacaattttaacacaattgcaaataaattgcatttgcaaaaaattaatgattttgtattatcacctggaccccaaccatacaaggtggctgtctatgttccaggaagtaaaggtgcaccttcatttgttagattatatcagtaccccaactttgctggacctcatgcagctttagctaataaaagtttctttaaggcagataaagttacaatgctgtggaataaaaaagctactgctgtgttggtaatagctagcacagatgttgacaagacaggagcttcctactatggagaacaaactctacactacattgcaacaaatggagaaagtgctgtagtgcaattaccaaaaaatggccccatttatgatgtagtttggaattctagttctactgagttttgtgctgtatatggttttatgcctgccaaagcgacaattttcaacttgaaatgtgatcctgtatttgactttggaactggtcctcgtaatgcagcctactatagccctcatggacatatattagtattagctggatttggaaatctgaggggacaaatggaagtgtgggatgtgaaaaactacaaacttatttctaaaccggtggcttctgattctacatattttgcttggtgcccggatggtgagcatattttaacagctacatgtgctcccaggttacgggttaataatggatacaaaatttggcattatactggctctatcttgcacaagtatgatgtgccatcaaatgcagaattatggcaggtttcttggcagccatttttggatggaatatttccagcaaaaacaataacttaccaagcagttccaagtgaagtacccaatgaggaacctaaagttgcaacagcttatagacccccagctttaagaaataaaccaatcaccaattccaaattgcatgaagaggaaccacctcagaatatgaaaccacaatcaggaaacgataagccattatcaaaaacagctcttaaaaatcaaaggaagcatgaagctaagaaagctgcaaagcaggaagcaagaagtgacaagagtccagatttggcacctactcctgccccacagagcacaccacgaaacactgtctctcagtcaatttctggggaccctgagatagacaaaaaaatcaagaacctaaagaagaaactgaaagcaatcgaacaactgaaagaacaagcagcaactggaaaacagctagaaaaaaatcagttggagaaaattcagaaagaaacagcccttctccaggagctggaagatttggaattgggtatttaaagattcacggaaagcaagttgatgaccagaaatcagtgcaaacacatcttctgttaaacccattggtatacacagaatattcctgtgcccacacttaatgtcaatctataattttaaccatttatccaagattctactaagtgtaaaattatttaataatgtctattaaattgatatttatatcttgc

SEQ ID NO: 2 - DNA, 1527 bp, Homo sapiens
tttttcaggcttttaaaataacctttattttttaaaagttagtatgtgcattataggaaattgaaaaacacaagcaaagaacaaagtcattcacaatcacaagcagtttatagtttgacatattcttctagatcctgtgtgtaggcacaacatccaattttatgggactgagactgtacagtatgtatcatgatttttcacacatcatgaatatttaccaattcaaaatcccaaagctatatgagtattctgataaccaagaatacactacaccaactcaaactgctaaaaaaaaaaaaaaagaaaaaaaaaaaaaaaaaaaaaaaaaaaaccacctggcgccgtccacgccgcttttgacagtccgaggatcagaaggactgtacatggtgaatggaccaccacattttacagaaagcacagtgtttccaagggaatctgggaagaattgcaaagtctgtatctttagtaaggatgggaccttgtttgcctggggcaatggagaaaaagtaaatattatcagtgtcactaacaagggactactgcactccttcgacctcctgaaggcagtttgccttgaattctcacccaaaaatactgtcctggcaacgtggcagccttacactacttctaaagatggcacagctgggatacccaacctacaactttatgatgtgaaaactgggacatgtttgaaatctttcatccagaaaaaaatgcaaaattggtgtccatcctggtcagaagatgaaactctttgtgcccgcaatgttaacaatgaagttcacttctttgaaaacaacaattttaacacaattgcaaataaattgcatttgcaaaaaattaatgactttgtattatcacctggaccccaaccatacaaggtggctgtctatgttccaggaagtaaaggtgcaccttcatttgttagattatatcagtaccccaactttgctggacctcatgcagctttagctaataaaagtttctttaaggcagataaagttacaatgctgtggaataaaaaagctactgctgtgttggtaatagctagcacagatgttgacaagacaggagcttcctactatggagaacaaactctacactacattgcaacaaatggagaaagtgctgtagtgcaattaccaaaaaatggccccatttatgatgtagtttggaattctagttctactgagttttgtgctgtatatggttttatgcctgccaaagcgacaattttcaacttgaaatgtgatcctgtatttgactttggaactggtcctcgtaatgcagcctactatagccctcatggacatatattagtattagctggatttggaaatctgaggggacaaatggaagtgtgggatgtgaaaaactacaaacttatttctaaaccagcgacttctgaagggccccttgcaaagtaatagggcttctgcctaagcctctccctccagccaataggcagctttcttaactatcctaacaagccttggaccaaatggaaataaagctttttgatgc

SEQ ID NO: 3 - DNA, 2385 bp, Homo sapiens
cccaaaataagtaggaatgggcagtggctattcacattcactacaccttttccatttgctaataaggccctgccaggctgggagggaattgtccctgcctgcttctggagaaagaagatattgacaccatctacgggcaccatggaactgcttcaagtgaccattctttttcttctgcccagtatttgcagcagtaacagcacaggtgttttagaggcagctaataattcacttgttgttactacaacaaaaccatctataacaacaccaaacacagaatcattacagaaaaatgttgtcacaccaacaactggaacaactcctaaaggaacaatcaccaatgaattacttaaaatgtctctgatgtcaacagctacttttttaacaagtaaagatgaaggattgaaagccacaaccactgatgtcaggaagaatgactccatcatttcaaacgtaacagtaacaagtgttacacttccaaatgctgtttcaacattacaaagttccaaacccaagactgaaactcagagttcaattaaaacaacagaaataccaggtagtgttctacaaccagatgcatcaccttctaaaactggtacattaacctcaataccagttacaattccagaaaacacctcacagtctcaagtaataggcactgagggtggaaaaaatgcaagcacttcagcaaccagccggtcttattccagtattattttgccggtggttattgctttgattgtaataacactttcagtatttgttctggtgggtttgtaccgaatgtgctggaaggcagatccgggcacaccagaaaatggaaatgatcaacctcagtctgataaagagagcgtgaagcttcttaccgttaagacaatttctcatgagtctggtgagcactctgcacaaggaaaaaccaagaactgacagcttgaggaattctctccacacctaggcaataattacgcttaatcttcagcttctatgcaccaagcgtggaaaaggagaaagtcctgcagaatcaatcccgacttccatacctgctgctggactgtaccagacgtctgtcccagtaaagtgatgtccagctgacatgcaataatttgatggaatcaaaaagaaccccggggctctcctgttctctcacatttaaaaattccattactccatttacaggagcgttcctaggaaaaggaattttaggaggagaatttgtgagcagtgaatctgacagcccaggaggtgggctcgctgataggcatgactttccttaatgtttaaagttttccgggccaagaatttttatccatgaagactttcctacttttctcggtgttcttatattacctactgttagtatttattgtttaccactatgttaatgcagggaaaagttgcacgtgtattattaaatattaggtagaaatcataccatgctactttgtacatataagtattttattcctgctttcgtgttacttttaataaataactactgtactcaatactctaaaaatactataacatgactgtgaaaatggcaatgttattgtcttcctataattatgaatatttttggatggattattagaatacatgaactcactaatgaaaggcatttgtaataagtcagaaagggacataggattcacatatcagactgttagggggagagtaatttatcagttctttggtctttctatttgtcattcatactatgtgatgaagatgtaagtgcaagggcatttataacactatactgcattcattaagataataggatcatgatttttcattaactcatttgattgatattatctccatgcattttttatttcttttagaaatgtaattatttgttctagcaatcattgctaacctctagtttgtagaaaatcaacactttataaatacataattatgatattatttttcattgtatcactgttctaaaaataccatatgattatagctgccactccatcaggagcaaattcttctgttaaaagctaactgatcaaccttgaccacttttttgacatgtgagatcaaagtgtcaagttggctgaggttttttggaaagctttagaactaataagctgctggtggcagctttgtaacgtatgattatctaagctgattttgatgctaaattatcttagtgatctaaggggcagtttagtgaagatggaatcttgtatttaaaatagccttttaaaatttgttttgtggtgatgtattttgacaacttccatctttaggagttatataatcaccttgattttagtttcctgatgtttggactatttataatcaaggacaccaagcaagcataagcatatctatatttctgactggtgtctctttgagaaggatgggaagtag

SEQ ID NO: 4 - DNA, 2156 bp, Homo sapiens
  misc_feature 437: n = a,c,g, or t
gattaactccatttgctccttaaccaaaattgttttacttcttttatttgagcagatttgtgtgatgccatgttgatatacttaagttgtcctggggttaaatatattcgtatattcaatcatccgatcattcatctatttactcagtcattcaacagatttgccaagcattgtgccaagtaatgagtgtgcaattgtgagccagaaaagacaaagtccacatcttctcagaatgtacagtcttacacatgtaaatgttcatagtattgagtgataagtatcactggaaaaataaaagatactaagggcatcagaggagcctctgaactgaatataggccagaaagaaataaggtaaggtcactcaagaatgactgaagttaccagggattattttagctccatgagggtaggaccatgtttttctcaacacccccnacccttaagtctctaaggtcctatatttttactttgtaattaacttttaaatctgttaaaaaaagtcatccctagattcatattcatgatatgtgaaacagtatgatcaagagagggtatcagtgaaggtaataatgaataaatcagaattgatgaattacagagataaaacattcagataaaattctgtagaagataactgttatcatgaaatgaacaagtccattatgtgtgggatctcaaatttaataaacatggtatgtcttctcctgattaagttttatagaatatatttcaatggtttttatggtctatttggtatcatatgcttatgtctcttatctcccccacttggtgtatgaatattaaaaaggataaatttaggatgggctggtggcagtttcataggactagtcattttttcaaaacaaacataacccgaaactctttttcacaatatctgcaatagaactagcctggctgaatagcagaattcccatttaaatgcctctaatgagatgcataatctttttttgtttttttcagacaagtctcactctgtggcccaggctgtagtgcagtggtgcaatcacagctcattgtagcctggaactcctgggctcaagtgaccttcctgcctcagcctcctgagtagctgggactacaggtgtgtgctaccacacctggctaatttttatttttattttttggtagagatgaggtctcgctatgttgcccaggctggtctcaaactcctgggttcaagtgatccttctgccttggccttccaaagtgctgggattacaagtgttagccaccacatctggccaatatgtgcagtcttgaataagacaattaccatgtcagagactgctctcacaaaggaagcagaattacatcaaatgatagacattccagaactgcagctctaagttcaatagcagcctatttctcattcaggtgatctttactgaataaagactttaaaaattgttttacagtatctagcacaaaaataagtataacagaataaacaactgctttagacattgctattatagtatatattcagcattcatacaattttaactatattaatatgtgtaatcaaaaataccttaccttgttctgccctgtgaaagtagcctaaggcctgtcaaaaacacaaagagcccaaacataataaaaaagattaaagaagacaatattaaaaaagcattgtctcaaagatctactgctatattatatttaagtcaggaagtaaatcatcttaaaataatggtcacttcttcaacagtgagagttaacacccaaagtgaacgtaacacttcaatcatcaagattacaatatatggactacttctggtaataacttggttgctgtttagaacttgtaccaaactaacatcatgtgcagaaaggaaagaacattatcacgtgtaactcagctattttgacagttctcttaaatcataactagtgatttttagtaaaaacaaaatataatcaaaagctgaatttattcgttgtactagtgaatttttaagagtccattattattgaaattcctacatacaatgttaagtctgaaactctttttgtcctacttaagctactgtttttgtaatgcattctctaatgacatttgatttctagaaacataactaatttgataaagtagagctgactatattttttgtccttaaaatgacctgtctt

SEQ ID NO: 5 - DNA, 1639 bp, Homo sapiens
gcggggaccaagtggcaacgacttggacatctgagctgtcactgccgaaaacaggccgcaagagagataatcaatatgcatttccaagccttttggctatgtttgggtcttctgttcatctcaattaatgcagaatttatggatgatgatgttgagacggaagactttgaagaaaattcagaagaaattgatgttaatgaaagtgaactttcctcagagattaaatataagacacctcaacctataggagaagtatattttgcagaaacttttgatagtggaaggttggctggatgggtcttatcaaaagcaaagaaagatgacatggatgaggaaatttcaatatacgatggaagatgggaaattgaagagttgaaagaaaaccaggtacctggtgacagaggactggtattaaaatctagagcaaagcatcatgcaatatctgctgtattagcaaaaccattcatttttgctgataaacccttgatagttcaatatgaagtaaattttcaagatggtattgattgtggaggtgcatacattaaactcctagcagacactgatgatttgattctggaaaacttttatgataaaacatcctatatcattatgtttggaccagataaatgtggagaagattataaacttcattttatcttcagacataaacatcccaaaactggagttttcgaagagaaacatgccaaacctccagatgtagaccttaaaaagttctttacagacaggaagactcatctttatacccttgtgatgaatccagatgacacatttgaggtgttagttgatcaaacagttgtaaacaaaggaagcctcctagaggatgtggttcctcctatcaaacctcccaaagaaattgaagatcccaatgataaaaaacctgaggaatgggatgaaagagcaaaaattcctgatccttctgccgtcaaaccagaagactgggatgaaagtgaacctgcccaaatagaagattcaagtgttgttaaacctgctggctggcttgatgatgaaccaaaatttatccctgatcctaatgctgaaaaacctgatgactggaatgaagacacggatggagaatgggaggcacctcagattcttaatccagcatgtcggattgggtgtggtgagtggaaacctcccatgatagataacccaaaatacaaaggagtatggagacctccactggtcgataatcctaactatcagggaatctggagtcctcgaaaaattcctaatccagattatttcgaagatgatcatccatttcttctgacttctttcagtgctcttggtttagagctttggtctatgacctctgatatctactttgataattttattatctgttcggaaaaggaagtagcagatcactgggctgcagatggttggagatggaaaataatgatagcaaatgctaataagcctggtgtattaaaacagttaatggcagctgctgaagggcacccatggctttggttgatttatcttgtgacagcaggagtgccaatagcattaattacttcattttgttggccaagaaaagtaaagaaaaaacataaagatacagagtataaaaaaaccgacatatgtataccacaaacaaaaggagtactagagcaag

SEQ ID NO: 6 - DNA, 1639 bp, Homo sapiens; identical to SEQ ID NO: 5

SEQ ID NO: 7 - DNA, 565 bp, Homo sapiens
gtggaaggagtggataataaaatgagtcagtgcaccagctccaccattcctagctcaagtcaagagaaagaccctaaaattaagacagagacaagtgaagagggatctggagacttggataatctagatgctattcttggtgatctgactagttctgacttttacaataattccatatcctcaaatggtagtcatctggggactaagcaacaggtgtttcaaggaactaattctctgggtttgaaaagttcacagtctgtgcagtctattcgtcctccatataaccgagcagtgtctctggatagccctgtttctgttggctcaagtcctccagtaaaaaatatcagtgctttccccatgttaccaaagcaacccatgttgggtgggaatccaagaatgatggatagtcaggaaaattatggctcaagtatgggtgggccaaaccgaaatgtgactgtgactcagactccttcctcaggagactggggcttaccaaactcaaagcccagctgatatgtatacttttctataggtatattacacttcaataaaaagtttgaaacag

SEQ ID NO: 8 - DNA, 1337 bp, Homo sapiens
gaagcttttcaaaattccgtcttcaagaagaaacacccgtggaggaagaagacattatacaaaacaaatttagaaactgggatcatgagtggaaaaacaaaggcaagaagggctgccatgttttttagacgttgctctgaagacgccagcggtagcgccagtggcaatgctttgttatcagaggacgaaaatcctgatgcgaatggggtaactcgatcatggaagattattctaagtacaatgcttacactgacttttcttcttgtaggactcctaaatcatcagtggcttaaagaaacagatgttcctcagaaatccagacaattatatgccataattgcagaatatggttcaaggctttataaatatcaggccagacttcgtatgcctaaagagcaactggaacttttaaagaaggaaagccagaatctggaaaacaattttcgtcaaattctatttttgatcgaacaaatagatgtcctgaaggcattgctaagagatatgaaggatggtatggacaataatcacaactggaacacccatggagaccctgtggaggacccggaccacacagaggaagtgtcaaacttggtcaattatgtacttaaaaagttgagagaagaccaagtcgagatggctgattatgccctgaagtcggccggagcctccatcattgaagctgggacctcagaaagttataaaaataataaagcaaaattgtactggcatgggataggtttcctaaatcatgaaatgcctccagatattattcttcagccggatgtctaccctggaaagtgctgggcttttccaggttcccagggtcataccctaatcaagcttgctacaaagatcataccaactgctgttaccatggagcacatctcagagaaggtgtctccgtcaggaaacatctccagtgcacccaaggaattttctgtctatggcatcacaaaaaaatgtgaaggagaagaaattttcctaggtcagtttatatataacaaaacaggaaccaccgttcaaacatttgaactccagcatgcagtttctgaatatttattatgtgtgaaacttaatatctttagcaactggggacacccgaagtatacttgtttatatcgattcagggtccatggcacaccaggcaagcacatctagaagagttggtacagaaggccatgccacatgtccagaatattcaagaatgcttattctcttagatgataccgcacccataggaattgagaattgggagtgggaagaaaacctcaaagtggttcatacttgcctgtaaaaagtaaatgcattttactaataaaaaaatatggaagtaaatt

SEQ ID NO: 9 - DNA, 1197 bp, Homo sapiens
aaaggcctacgtcgacctatgaccatgattacgccaagcttggcacgaggcagggaggtcctgaccccaacgagcacttctgacaatgagaccagagactcctcaattattgatccaggaactgagcaagatcttccttcccctgaaaatagttctgttaaagaataccgaatggaagttccatcttcgttttcagaagacatgtcaaatatcaggtcacagcatgcagaagaacagtccaacaatggtagatatgacgattgtaaagaatttaaagacctccactgttccaaggattctaccctagccgaggaagaatctgagttcccttctacttctatctctgcagttctgtctgacttagctgacttgagaagctgtgatggccaagctttgccctcccaggaccctgaggttgctttatctctcagttgtggccattccagaggactctttagtcatatgcagcaacatgacattttagataccctgtgtaggaccattgaatctacaatccatgtcgtcacaaggatatctggcaaaggaaaccaagctgcttcttgacattaggtgtagcatgtctacttttaagtccctcacccccaacccccatgctgtttgtataagttttgcttatttgtttttgtgcttcagtttgtccagtgctctctgcttgaatggcaagatagatttataggcttaattcttggtcaggcagaactccagatgaaaaaaacttgcatcttcagtatacttcctaaagggcaatcagataatggatatgttttatgtaattaagagttcactttagtggctttcatttaatatggctgtctgggaagaacagggttgcctagccctgtacaatgtaatttaaacttacagcatttttactgtgtatgatatggtgtcctctgtgccagttttgtaccttatagaggcagattgcctccgatcgctgtggttcttattatcaaaattaagtttacttgtatacggaacaaccacaagaaatttgattctgtaaagaatcctctttagctgtggcctggcagtatataaatggtgctttatttaacagaatacctgtggaggaaataaagcacacttgatgtaaaaataattgttttatttttattgacatgactgattgattgctattctgtgcacttaattaaactgattgtgatgactttt

SEQ ID NO: 10 - DNA, 2660 bp, Homo sapiens
tatgaccatgattacgccaagcttggcacgaggatcatccacctctaccacctgctctggtctgccaccatcctcaacattgttggcctgttcctgggcatcatcactgccgctgtccttggaggctttaaggacatgaacccaactctcccagcactgaactgttctgttgaaaatacccatccaacagtttcttactatgctcatccccaagtggcatcctacaatacctactaccatagccctcctcacctgccaccatattctgcttatgactttcagcattccggtgtctttccatcctcccctccctctggactttctgatgagccccagtctgcctctccctcacccagctacatgtggtcctcaagtgcaccgccccgttactctccaccctactatccaccttttgaaaagccaccaccttacagtccctaaagaggaatgcctgctggctattgagattattgtggcttttgtatttctgcttcagtggaagtgtgtagggtacaaaatttaaagtgtgactcttatgcataaagttttacaatggcctgccaggctagggaaagatagggacgaagcttattcattattagtgcagagcaggggtggtcaggctgaacgcagcacagaagggcagctcacattctctaagcaagactggggagccagcccagcaagaagcttgtttggacttgcattaccctatgctccacctctgtattcagcagaagtgtggttgccatctttttcactttatgtaaaggagtgttgccctcgggcccttggcagattgccaccccagcacctaggttgaagcacctggtttataggccctatctttccctacccctaaagtcagtccctaaggacaatttcccagctgatggggctacacagtagttccaatacagagagttctggctaagattttgtttgcttgtgtctggatgttgaaaaagactgcccgtatctcttactccttccttctctgtgagtattgtaaaaatggctgttgtgatcactcagctcagcttttgttattggtacctcctaaagggaaaagtgcaatattcttgcatcttcagtagtggggaacaggatgtattgttccggaaacactgaaatacacagcaacatgtgagatgttttaagtagatcacttaggagacagtggttctactacatgttgcattattacaaaatacatttgctacaggagatataaatcttatggttgtaattcagagtttaaaaatgttataaattaggttcttgggtcgtgatatgaattgttactaatctttgtgactatttaatcttcaaatattgtgcttaaccccagcaatccgcacgtatcctgcaccccaccccaaaagagtcatctgtattttaatgccactggtcttatcggtccttttgtctgttgagaccagtcatgacagcattcaagattatgaaagtgttacaatgccgcttcaagtctgcaaaacctcaaacgtagccaacttgacaaatatttaagtgttacggcagatttaaaatccatctggcacaccgtggtaggtatttgtacagttcttttaattacacatagctttaaaccatcaacctgatgagtttaaagcttttgcacccatgccttcacttcagaatgaacaccttcattgtgatcttatgttaacctgagaattgatttaaaggaagattgataatcctatactttataacgtaaaaatacaggggctacaggagggtacctaattagacagttctccaaacacagaacacacactggaaaattttccggccaattttgctacctcccaacttgatggattagaggtagcgcaaatgctggtgctcccatctaccttgtagacacttagccatcaagaatcaaggcacaagaagtgcactctctcattaacagtaaatgtttgcaagatattcagtttaactttcagcatcatgaatgttcttatccagattttgaatccgaaaaactataatccttttatgttatacaaaattactatgattttttacagttctgagcatattaaaattctactggatttcaaaaagagactaatacccaactgactaactaaacaaatatcaacttgtaatactcaatgaatttttttgccatttacatttgaccgttggctttagtgaatgtccatatttaattttttaaggcaccattacacagtttatcctacatttatcacatttcttaaagtgttaagattctatggctcatttctatgtatttttcttactttacaaaataacctgaaacagtatagattttgtaacacttaatttgagcagcttttttattacattgaattatataaagtgcatgttaccttagaaaaattaatatttgctgctttactcttttgcaaaacatttgctgtaatgaatggatttgtatttccaatatgtatcttgactgcattttgtaatatttactgctttattcctaattctgctttaaagtactgaactgggcatgaaacattaaaatattaatccagaaactgtataaactggatgttgcttaaaatctgtatcactgccatgttgaaaactcagactgcttttgtgatgtttcaaatgaataaaactatcctcccctcgtt

SEQ ID NO: 11 - DNA, 1647 bp, Homo sapiens
gagacgcggggaccaagtggcaacgacttggacatctgagctgtcactgccgaaaacaggccgcaagagagataatcaatatgcatttccaagccttttggctatgtttgggtcttctgttcatctcaattaatgcagaatttatggatgatgatgttgagacggaagactttgaagaaaattcagaagaaattgatgttaatgaaagtgaactttcctcagagattaaatataagacacctcaacctataggagaagtatattttgcagaaacttttgatagtggaaggttggctggatgggtcttatcaaaagcaaagaaagatgacatggatgaggaaatttcaatatacgatggaagatgggaaattgaagagttgaaagaaaaccaggtacctggtgacagaggactggtattaaaatctagagcaaagcatcatgcaatatctgctgtattagcaaaaccattcatttttgctgataaacccttgatagttcaatatgaagtaaattttcaagatggtattgattgtggaggtgcatacattaaactcctagcagacactgatgatttgattctggaaaacttttatgataaaacatcctatatcattatgtttggaccagataaatgtggagaagattataaacttcattttatcttcagacataaacatcccaaaactggagttttcgaagagaaacatgccaaacctccagatgtagaccttaaaaagttctttacagacaggaagactcatctttatacccttgtgatgaatccagatgacacatttgaggtgttagttgatcaaacagttgtaaacaaaggaagcctcctagaggatgtggttcctcctatcaaacctcccaaagaaattgaagatcccaatgataaaaaacctgaggaatgggatgaaagagcaaaaattcctgatccttctgccgtcaaaccagaagactgggatgaaagtgaacctgcccaaatagaagattcaagtgttgttaaacctgctggctggcttgatgatgaaccaaaatttatccctgatcctaatgctgaaaaacctgatgactggaatgaagacacggatggagaatgggaggcacctcagattcttaatccagcatgtcggattgggtgtggtgagtggaaacctcccatgatagataacccaaaatacaaaggagtatggagacctccactggtcgataatcctaactatcagggaatctggagtcctcgaaaaattcctaatccagattatttcgaagatgatcatccatttcttctgacttctttcagtgctcttggtttagagctttggtctatgacctctgatatctactttgataattttattatctgttcggaaaaggaagtagcagatcactgggctgcagatggttggagatggaaaataatgatagcaaatgctaataagcctggtgtattaaaacagttaatggcagctgctgaagggcacccatggctttggttgatttatcttgtgacagcaggagtgccaatagcattaattacttcattttgttggccaagaaaagtaaagaaaaaacataaagatacagagtataaaaaaaccgacatatgtataccacaaacaaaaggagtactagagcaagaag

SEQ ID NO: 12 - DNA, 1467 bp, Homo sapiens
ctttttttttttttttgagatggagtcttgctctatcgcccaggttggagtgcagtggcacaatctcggctcaccacaaccttcacctcccggattcaagtcattctcctgcctcagcctcccaagtagctgggattacaggtgcgcgccaccacgcctggctaatttttgtattttgagtagagacaggatttcaccatgttggccaggctggtcttgaactcctgacctcgtgatccacccacctttggcctcccaaagtgctgggattacaggcgtgagccactgcacccggcaaaattgtgtttttaaaaacgtatgtgatacatatttttcactcctctaaagaataaacttttgaagaggccataaggtgatgtctctagaactgataacctgggtccattaatatctttgatttttaccatgaatttgcttgtgctgataaaatatcaaaggacggctgacagatctttgttctaaacgcattttaggaaacttctagtgatacctgaacacaagaaaggaagtagtctctgctgagcaataaatgaaggtgtgtggctgggcacggtggctcacatctgtaatcccatcactttgggaggctgaggcaggtggatcacctgaggtcaggctcaggagaattgcttgaacgcaggaagcagagtttgcagtgagccgagactgtgccattacactccggcctgggcagcaagagtgaaattctgtctcaaaaaaaaaggaaaaaaataaatgcaggtgtgctaaataaaacagcgaccttaatctttatgtaaatttcagacaatccaatcagtggcttatccagctctaaactgaatttagaggctctaagtccagaatcctttggaaatgactgaccctttcaggattctgaggaaagtaaaagaagttcattgatggggagcaggactcttacctggcgtacgttccttctagagcagggtcctcgctgttgtgcccaaggtagtggtcaatcaacttctctcgagaggcagtattgctttcatcactgaaatctgcagggtctccaatgatatttatggcaaccaaagcaacctgattatatatgttgtatttgttgacatggttttggtgaaaaatcagtttaagaaattgtcctactgcatccacataaactgattttagttcccgggctttgcaacctgtcttttcattatcacagagagacacgtagctgaaaaacaaaacacaactgaagaatttgaaaatgtgctgttcaataaaactgctccctactctgattgaactcaataggctcatttatgtttattgttttattttttaaagctagactacccctatgcaggatcaacaggtttgaataaaagctaagtctagaatgaaaaacctaggaaaaacccctagaactcaaattctaattagtattcttcttttgtttcccgattgaattctagacct

SEQ ID NO: 13 - DNA, 815 bp, Homo sapiens
gtgtgcgcagcgctaggtgtgcgcttcgccctgtaggtagagagaccctttggttagctttccacgccaagtggccgttccaggcaggcagtgtcgtcttggttcagccaaggtcacagagggagtgatagcttccgcgcagccctggctacggactctgggcatctttccactgccccgcttgcgccacctgttaggcaggatcgtttttcctctggggcaagatcaaaatccaggtcctgcaggaagaaactcctcttaaaaataattaagcctgatcaagatgacaacctcccaaaagcaccgagacttcgtggcagagcccatgggggagaagccagtggggagcctggctgggattggtgaagtcctgggcaagaagctggaggaaaggggttttgacaaggcctatgttgtccttggccagtttctggtgctaaagaaagatgaagacctcttccgggaatggctgaaagacacttgtggcgccaacgccaagcagtcccgggactgcttcggatgccttcgagagtggtgcgacgccttcttgtgatgctctctgggaagctctcaatccccagccctcatccagagtttgcagccgagtagggactcctcccctgtcctctacgaaggaaaagattgctattgtcgtactcacctccgacgtactccggggtcttttgggagttttctcccctaactaggcctctttggcaattctaacgttactggccgaagccgcttggaataaggccggtgtgcgtttgtctatatgttattttccaccatattgccgtcttttggcaatgtga

SEQ ID NO: 14 - DNA, 779 bp, Homo sapiens
ggcacgaggccatgctggagagtctcagcacagaaaagaactccctggtctttcaactggagcgcctcgaacagcagatgaactccgcctctggaagtagtagtaatgggtcttcgattaatatgtctggaattgacaatggtgaaggcactcgtctgcgatgttcctgttctttttaatgacacagaaactaatctggcaggaatgtacggaaaagttcgcaaagctgctagttcaattgatcagtttagtattcgcctgggaatttttctccgaagataccccatagcgcgagtttttgtaattatatatatggctttgcttcacctctgggtcatgattgttctgttgacttacacaccagaaatgcaccacgaccaaccatatggcaaatgaaccaagcccagttgttgcagtgattggttgtctttttctagacttgggatctgcaagaaggccaattgcctaaaatttctgagaacagtgcacaagattattttatcactacaagcttttaaactttttaagttattgtacaagtattctacctaaatcttccaatttcctttaaatggtaagagtttctaaaacagacaataatttaacaagctcagctctgctttatctgagtttagtggtcctaatatatatgtagagaaagatggtggggttgttcacctctgtacagaccatctgtatgttaggtgacattgattatgggttataatcagggaaactaattgtatttagtgacaaaaataaaaagtttttttttttat

SEQ ID NO: 15 - DNA, 1230 bp, Homo sapiens
gccatccccatcaagcaggggatcctgctaaagcggagcggcaagtccctgaacaaggagtggaagaagaagtatgtgacgctctgtgacaacgggctgctcacctatcaccccagcctgcatcttggtgcgctgtctgtgccctctgccaacagtggaggcagcgaggatgaagaggagtggcaaggggtgtcttggatgtggaagaaagtgtgggttgtggggttgggctgggttttggtttcagtagaggaaacacagccagctggagagcagagctcaggggggttggtggcttttcagagtcacccggctggtggctgagctaagacttggacccatgactttggctctgagcattacccagatttttctgcacttgccaagagcacctccctctggggctggctgagagagtcatgtaagagttaatagcagggtgagtgttgtcaagtaaggagggagttgggcttgcctgcctggggctagggtgggtgtctgagcccccaggagtgcccctccatgccgcacttgttgcactgtgcgagtcttagaattcaccctgcaaggccaggcctggaagtcctggcatccagatcctgtcacaggccccgaagcatactgggctacacacggtgcaaaagcacgagtggaggcagggccggttgtggctccgtgcgctcacagctctccgtggagctctggcagagcccgcttcactttatgtcacgccgccaccacccccgccacactttccctccctccggggctgccacctcacctccttcatctcccctggccgccaccttccagcctgagcatgctcttcagttgccagcaatgagcaggccacctccctacctgtgagcagccgcttctctctggggctcttcaaaccctaaaccctggcaggaagcatgtcgaggaaggagctccggcaactccagaggctccgacagaactctgggctgagcctggctctcctctccagcaagggtctcgcctgagccccaagggcatcgggactggtgactcacctatggatgggggccggggagacaggacacacagaagatgagttcgtgggccagccctgagccccgcgcccgattctcgccggcccaagagagcccgccgcagcctcccccattttgcagccagcggagccattcacacaatcaccttctgttaattctatctgcaacatcaattaaattgtttgtagaaact

SEQ ID NO: 16 - DNA, 1135 bp, Homo sapiens
ctatggcgaccgccacggagcagtgggttctggtggagatggtacaggcgctttacgaggctcctgcttaccatcttattttggaagggattctgatcctctggataatcagacttcttttctctaagacttacaaattacaagaacgatctgatcttacagtcaaggaaaaagaagaactgattgaagagtggcaaccagaacctcttgttcctcctgtcccaaaagaccatcctgctctcaactacaacatcgtttcaggccctccaagccacaaaactgtggtgaatggaaaagaatgtataaacttcgcctcatttaattttcttggattgttggataaccctagggttaaggcagcagctttagcatctctaaagaagtatggcgtggggacttgtggacccagaggattttatggcacatttgaatgaagatgaaggatcattgatttccttgtgtatggataatccgggaacaggccaactaaatatttgatgaatgtatgatttcaaatacagtgaattccctgggagtcatcaaagaagaccggctaattttttgtatttttagtagagacagggtttcaccgtgttggccaggatggtctcgatctcctgaccttgtgatccacccacctcggcctcccaaagtgctgggattacaggcgtgagccactgcgcccggccacattcagttcttatcaaagaaataacccagacttaatcttgaatgatacgattatgcccaatattaagtaaaaaatataagaaaaggttatcttaaatagatcttaggcaaaataccagctgatgaaggcatctgatgccttcatctgttcagtcatctccaaaaacagtaaaaataaccactttttgttgggcaatatgaaatttttaaaggagtagaataccaaatgatagaaacagactgcctgaattgagaattttgattttttaaagtgtgtttctttctaaattgctgttccttaatttgattaatttaattcatgtattatgattaaatctgaggcagatgagcttacaagtattgaaataattactaattaatcacaaatgtgaagttatgcatgatgtaaaaaatacaaacattctaattaaaggctttgcaacac

SEQ ID NO: 17 - DNA, 2950 bp, Homo sapiens
  misc_feature 2477: n = a,c,g, or t
aaagtttccaaaacagaccgagaataccaagaatacaatccttatgaagtattaaatttggatcctggagccacagtagcagaaattaaaaaacaatatcgtttgctgtcacttaaatatcatccagataaaggaggtgatgaggttatgttcatgaggatagcaaaagcttatgctgctttaacggatgaagagtcccggaaaaattgggaagaatttggaaatccagatgggcctcaagccacaagctttggaattgccctgccagcttggatagttgaccagaaaaattcaattctggttttacttgtatatggattggcatttatggttatccttccagttgttgtgggctcttggtggtatcgctcaatacgctatagtggagaccagattctaatacgcacaacacagatttatacatactttgtttataaaacccgaaatatggatatgaaacgtcttatcatggttttggctggagcttctgaatttgatcctcagtataataaagatgccacaagcagaccaacggataatattctaataccacagctaatcagagaaattggcagcattaatttaaagaagaatgagcctccacttacctgcccatatagcctgaaggccagagttcttttactgtctcatcttgctagaatgaaaattcctgagacccttgaagaagatcagcaattcatgctaaaaaagtgtcctgccctacttcaagaaatggttaatgtaatctgccaactaatagtaatggcccggaaccgtgaagaaagggagtttcgtgctccaactttggcatccctagaaaactgcatgaagctttctcagatggccgttcagggacttcagcaatttaagtctccccttctgcagctccctcatattgaagaggacaatcttagacgggtttctaatcataagaagtataaaattaaaactatccaggatttggtgagtttaaaagaatcagatcgtcacactctactgcacttccttgaagatgaaaaatatgaagaggttatggctgtccttgggagttttccatatgtgaccatggatataaaatcacaggtgttagatgatgaagatagcaacaacatcacagtaggatccttagttacagtgttggttaagttgacaaggcaaacaatggctgaagtatttgaaaaggagcagtccatctgtgctgcagaggaacagccagcagaagatgggcagggtgaaactaacaagaacaggacaaaaggaggatggcaacagaagagtaaaggacccaagaaaactgctaaatcaaaaaaaaagaaacctttaaaaaaaaaacctacacctgtgctattaccacagtcaaagcaacagaaacaaaagcaggcaaatggagtcgttgggaatgaagctgcagtaaaggaagatgaagaagaagtttcagataagggcagtgattctgaagaagaagaaaccaatagagattcccaaagtgagaaagatgatggtagtgacagagactctgatagagagcaagatgaaaaacaaaacaaagatgatgaagcagagtggcaagaattacaacaaagcatacagcgaaaagagagagctctattggaaaccaaatcaaaaataacacatcctgtgtatagcctttactttcctgaggaaaaacaagaatggtggtggctttacattgcagataggaaggagcagacattaatatccatgccatatcatgtgtgtacgctgaaagatacagaggaggtagagctgaagtttcctgcaccaggcaagcctggaaattatcagtatactgtgtttctgagatcagactcctatatgggtttggatcagattaaaccattgaagttggaagttcatgaggctaagcctgtgccagaaaatcacccacagtgggatacagcaatagagggggatgaagaccaggaggacagtgagggctttgaagatagctttgaggaagaagaggaggaagaagaagatgatgactaagcagtactctgaatggaccacagtgtttgcacatatttgcaattttttgctgttttggaagtgtatcataaaccagaaacagtacagaactgatgttgagggaggtgtagtttttttactctagaaatgggtgcataatataactaggcagtggcggtgccttggtacaacctgaaaaatgttaaggcttattgaaacctttcaagtaggggatggtacatttatttcatctgcaaatgataataaatcctttgttattataactgtccagaagtgtgggctatgtattatctgatcagtctatggtcccagtaaaagtaaagatgcaggaaacacagtctgtaaatgagcgacttttctttgttcagctttagttttagcaaacaccacaaatatgttttaagtaacatcgctcaagtttaagtaacatcgctcaagttgataatctcttgataagctctgttgtngacattttgcagtgatacaacagctccactcatagatttaaacttttatttttacttatcttggtcataagttggcattctctcacattccacatgatatagagggctacgttttggaattttccttttcttaattgcccagagttatcagacagattataaaaatggcttttaatggcttaaaccatttctaaacctctatcttagcagatcaatgcaggatctaattcttttgataagttctagctctaaaagtgatagtgggactgtatgttttctgatactggtggcttatgttattaaaccttttttaaaaaaggttcactctaaaagctgaactacatccttagttttcagtctacttgactctatcaggagctttttaaggaaagtaagtataacatgcaaaggaagctttttttgtattcattttggactcctgtcaataaaaatagaagtttgttgactcgttt

SEQ ID NO: 18 - DNA, 3208 bp, Homo sapiens
aagggaggaaatgtacctcagctggatgcccctatctctcaattttctggactgaaggacgcagatagagctcaaaaacatggcatggatgaatttatctcttccaacccctgtaactttgaccacgcttccctctttgagatggtacaacgccttactttggatcacagacttaatgattcctattcttgcctgggctggttcagtcctggccaggtgtttgtactagacgagtattgcgcccgaaatggagtccgggggtgtcaccgacatctctgctacctcagagacttgcttgaacgggcagaaaatggcgccatgatcgaccccacccttcttcactacagctttgccttctgtgcatcccatgtccatgggaacaggcctgatggaattggaactgtgactgttgaagaaaaggaacgttttgaagaaatcaaagagaggctccgagttctgctagaaaatcagattacacattttaggtattgctttccatttggtcgacctgaaggtgctttgaaagctactctctcactcttggaaagggttttgatgaaagatattgttaccccagtgccacaagaggaggtaaaaacagttatccgtaaatgtctggaacaggctgcgttagtcaactattctcggctctcagagtatgccaaaatcgaagagaatcaaaaggatgcagaaaatgtaggccggttaatcactcctgccaaaaagcttgaagatacaatacgtcttgctgaactagtcattgaagttcttcagcaaaatgaggagcaccacgcagagccacatgttgataaaggagaagcctttgcgtggtggtcagatttaatggtggagcatgcggagacgttcctgtcactctttgcagtagacatggatgcagccttagaggtgcaacctccagacacatgggacagttttccactatttcagctgctgaatgattttctccgtactgactataatttgtgcaatggaaaatttcacaaacacctgcaagacctgtttgccccacttgttgttagatatgtggatctgatggagtcctcaattgcacaatccattcacaggggctttgagcgggagtcatgggaaccagtcaagagtttaaccagtaacctacccaatgtgaacctacccaatgtgaaccttcccaaagtaccaaatctaccagttaacatccctctaggcatcccacaaatgcctactttttcggcaccgtcatggatggctgctatatatgatgcggataatgggtcaggcacctcagaagatctgttttggaaacttgacgcccttcagaccttcattcgggacctgcactggcctgaagaagagtttggaaagcacctggaacaacggctgaagttgatggcaagtgacatgatcgaatcttgtgtcaaaagaaccaggattgcatttgaagttaagctgcaaaaaaccagtcgatcaacagattttcgagtcccacagtcaatatgcaccatgtttaatgttatggttgatgccaaagctcaatcaacaaaactttgcagcatggaaatgggccaagagcatcaataccattcaaaaatagacgaactaattgaagaaactgttaaagaaatgataacactcttggttgcaaagttcgttactatcttggaaggagtgctggcaaaattatccagatatgacgaagggactttgttttcttcttttctgtcatttaccgtgaaggcagcttccaaatatgtggatgtacctaaacccgggatggacgtggccgacgcctacgtgactttcgtccgccattctcaggatgtcctgcgtgataaggtcaatgaggagatgtacatagaaaggttatttgatcaatggtacaacagctccatgaacgtgatctgcacctggttgacggaccggatggacttacagcttcatatttatcagttgaaaacactaattaggatggtaaagaaaacctacagagatttccgattgcaaggggtcctggactccaccttaaacagcaagacctatgaaacgatccggaaccgtctcactgtggaggaagccacagcatcagtgagtgaaggtgggggactgcagggcatcagcatgaaggacagcgatgaggaagacgaagaagacgattagaccatttggtcctagagtctgctgggacagagtcctgtaatcagtgcatgtccttagtctgttagttaaacccattaggaattttctgtcaactaccatgcccatgagatgtttatcaatacaactgccattttagctatgtggtaccaagattagcaaatgaccttcatatccactgatttcctgatgtccatgtctatatgtttacaagcaatatggagcaccattctttaaatactgttcatggagaatacatagtctaaccactaggcgtgtccctgttatcagcaaagatcaatgatgcttcattcatgtactatgtatgcattggtggtaaatggatgtgagggcaagtacatcaagtacattcactctgtttcacgtatgtggatgccagttaattaaatgagtacgtaaataaattaattaaaacacatagatctgctttgtgtttttatttttattttttgaaaaacaaaaggcaagtctccaacaattaacttttgatgctttctgttcccctaaaaccaaaaaatgaaccccttgtgtcgttgttaacccatcctttcatttactcatataattagccaaaaaaaaaaggatggctacataccaatggattgattctcttaattgccacggcaagggggcgatcctatcatgacttaacatcaagcgcgcagttcaaaactactgtcttctgtcaaagttttctcctcttaaatgttattttgcttttacgtctcaactgtgtatgtaaaaaaaacgaatatttaaattacaaccctagactaaaaatgtgtttataataagatgtggatatttccttcagtagattgtaaccataatttaaattattttgttccacactgttttttatatctgtcatgtacattgcattttgatctgtaactgcacaaccctggggtttgctgcagagctatttctttccatgtaaagtagtggatccatcttgcttttgccttatataaagcctacagttatggaagtgtggaaaactgtggcttctcaataaatattcagatgtcctaag

SEQ ID NO: 19 - DNA, 139 bp, Homo sapiens
gctatattttggctaacctttgccctagacactctaccagatgttaatgcagtatcaagtgtaaattgtgtcaccctattctgttctacccttttccctgctgccgaaatatcttgctctcctctaccccctctagagc

SEQ ID NO: 20 - DNA, 1305 bp, Homo sapiens
gctaccccaacctgtgtggctgggccgcggtctcccctcaagggcctggggccgtgcctcgggtgtacgcgtaggggtctgtgtgctgggggtggctcaccgggcagcgtgggtgagcggcgcagcggcggcagcggagagcgagagaggggagcagagacagaatcgcctaagctgaagtgtagtggcgccatcatggctcactgcggcctccggctccttggctcgggtgattctcctgcctgagcctccctagtagctaggactacagtgctgtagaagagagtcacatgattggtgccctcaaaaaattggtgccacttgaagaatggatgatgatgattttggtggttttgaggctgcggagacttttgatggtggaagtggtgaaacccaaacaacatctcctgctattccttgggctgcctttcctgcagtatctggagtccatctttcaccatcttctcctgagattgtactggaccgtgaccactcttcttccattggctgcctctcttctgatgccattatttcatcaccagagaatacacatgcagcaaatagcattgtgagtcaaactattccaaaagcacagattcagcaatcaacacacactcatctggatatctcactttttccattgggtttaactgatgaaaaaagtaatggaacaattgcccttgtggatgattctgaggatcctggagccaatgtatctaacatacagcttcagcaaaaaatttcaagtctggagattaaactcaaagtatctgaagaagaaaaacagagaattaaacaggatgtggaatcattgatggaaaagcataatgtcttagaaaaaggctttctaaaagaaaaagagcaagaggccatttcttttcaagatagatacaaagaacttcaggaaaaacataaacaagaattggaagacatgaggaaagctggtcacgaagccctcagcattattgtggatgaatataaggcactactgcagtcttcagttaagcaacaagtagaagctattgaaaaacagtacatttctgcaattgagaaacaggcacacaagtgtgaggagttgctaaatgctcagcatcagaggctccttgaaatgctagatacagagaaggaactgttaaaagaaaaaataaaggaagctttgattcagcaatctcaagaacagaaggaaatattggaaaagtgtttggaggaagaaaggcaaagaaataaagaggcattagtatccgctgcaaagcttgaaaaagaagcagtgaaggatgcagttttaaaagtcgtagaagaagaaag

SEQ ID NO: 21 - DNA, 3580 bp, Homo sapiens
catttttttaaacattttacaaacatctaaaaactacaacacgtcacagctacagtggggtgaggggagggcaccaaagaaagcagccacacagagtagggtgggatggggcagcctaacctacagaggctattgtgtggaagggtaaaatggggaaactgaggcttctagtccctgcattaggggtccctcactcactgcccaacctctccccactcagaggagctgccaggagggcccctgcttcctgcctctgccccagctctttgtgctttttgatctgctggtttgaccagatgcctggtttctttccctcccctgctcccctccctgtgaggggacaggtagggagcatgggagggcagctgtgctattcccgcctgtgctgtagtgggtggagcctctcactccagaggaggcctctgcttcttgaggagggaaggagatgggccttgtcggatgccctcagatctccctagactgtgggactcttatcccaggctggcctagggctcctccatcccaggctcaacacagaaaccagattaggggaggaactgtgggaggcagggttgtgtgtgcatccgctgaaattacccttggcttatatttgaggacagtatagtgataccccccgccccatggcacatgcacacacatatgtaagtatacatacacattcacacacagtcctgcggagctgcctcagaacttaatctattaataaataagaatcagaaagctaatttcataaaattcaggcttcatatttgcagcccaaattgagaggaaagtggaggccagagggctgaggtttattgcttctcccccagcatccaacaggagatgtgagagggcacccgaggcccactcttcagactctaagaagttcttttggtccatggtctacaccagagccccagcccctagcataattgcatacctgtggtttcaccagggcctaggcagagggaatgatggggaaggcaggaagcctattctggaacccctggaacagggaagcaagggcccctctctaacagggggagaaggatggggctcagccttctcttgtgcaaagtcaagggcagtgggaaatggggagtacagcttcatctcaaaactgggatgaaggagccttccctgtagtccctgcccacggggtttacacacatgcacacgcacacgcacacacagctaagacaccaaacacggggagtggggagtgagggctctggaggtcaggatggcagggcagggaggggaaggaaggagttgttggtctcacagtgtgcctgccaatcccaaagccctagagaccccttcactgcagcacctgcccccgggtctcaggcagcttcagggccagagagctgccaagggcaagggcagctgaggcaaagaggatgggtgcagccttggtgattcccacgaaggatgtgaagatgctgatccccagcacagctgccagcttacacagggcattcaggaagccaaaagctgtggtcctcttgtctgaggggtaaagttcaacagtcaacacgtccagcgcattccaggatgcaatgctgaccccgccaaaaaggcagagcagagcgatcatggccgactcactgttcccaaaagacaggaagaagcaggagacacaggacatcacgctggagccagcaagcattctgagcctgccgatcttgtccatgagcagggcagacacgatattcccaggaagcactgccagtgtccccaggaagctcacaaagtataccatgtaggcaccttcgcccgtccctgtcacgtctagcgggcagccctccttgttgtgcaggaatgtactgtttatcagacggctgttcacaaacttgtactcgaacaggtcagtgttatagaacacagtgttgatgaatgtgcagttgcggaaaaacgtgttgctggatgtgacatcctcaaaataacactcttcaaacagggaatcctcaaaggacactgacttgagccgcagcccaatgaacttgtcattgaagtactgcccgcctcggtggatctgattctccaacgtgaagttaaaagttacatgctctacgcgctccccggggaacactttggtgcgggatgcgtagtccactgcctggagatggcggatcatgtcaggaaaccagacggtcaggccatagtagctgaatgacatggtgaaccacacacccatcatcatcagagtgatgcgccgatattcgggaccaaaacaggagagaaaattcccccaaacctgcccccctaggctcaaggcccggaccccccagcgctggtaccaggtccctgtgtccgactggatctcaatcaattcatcctcctgatgaatcgtcttaatgtgggttactgagaacactcgctcaggatgtcctttggctcgcatgttggtatcatggacctgcttcagcaccatccaggcctcatcatgctttccattctctaggaagaaacgggggctctcaggctgcgtggtcagagccccaatggcaaacacagaaggaaaggcgcagacgaggacgaagaccctccagctgtggaactggtaggcagaacccatctgaaaactccacccatagtgggggatgatggcccaggccatagcagctgcgtacacgccaccaatcatccaaaacatgcagagccagctcaaatgctcccctcgtttctcctgggccagaaactcggagaaataggagaagacaatggggatggaccctccaatcccaaccccagaaagtaggcggcagaagaggaaagtgccgtaaccctggacaaaagatgagaagaaggcgaagacgctgttgactgagagcgagatgagcagacactgcctccgacccagccggtcagccagacctccccagaggaaggctcccaccatcatgcccaggtagacgatgaggcctagcatgcctttgttggagtcggacaggcacatgtctttctcagcgctgggcagcacgaagcccaccacaaagacctccacaccgtcagccatcagcgccagaccaagcacaaaatacagtgtccactggaagcggccgtggccacactcccgtaggatggcttcatactgttgggccagttcttctcgttctttccgtcgttgtgcctccccccggcccccagggggaccctccccatcactcaagcccccccttactccagccaggggcgccccatctgccatccgctcgcctttgcccccagactctgcccggggaatgccctgatattccccttcatagatgtcatcatcctcgtcatggccctcagtagcatcactggatgcaccaccttcctcctcatcctgggtcccttctcctgggtaataaccatcactgggagcagggaagtcatcatcatcatcctcctcctcaaagcgggagtacgatcttcgggaatattcgtcctggactctgtccaggcccttcaccaccttcttggccgcatgctttttgacttccttagcaatgtctttggccccacggatgaaagctgcccggtctcggaagccctcttccatgatggggcttggggcacttctagacct

SEQ ID NO: 22 - DNA, 783 bp, Homo sapiens
tactgactcgaggccaagaattcggcacgagggttgtagatagccagtcaaccagcagtattagtgctgttttcaaagatttaagctctataaaattgggaaattatctaagatcattttccctaagcattgacacatagcttcatctgaggtgagatatggcagctgtttgtatctgcactgtgtctgtctacaaaaagtgaaaaatacagtgtttacttgaaattttaactttgtaactgcaagaattccagttcagccgggcgaggattagtattatttttaactctccgtaagattttcagtaccaccaaattgttttggattttttttctttcctcttcacataccagggttattaaaagtgtgctttctttttacattatattacagttacaaggtaaaattcctcaactgctatttatttattccagcccagtactataaagaacgtttcaccataatgaccctccagagctggtaaacctaccacaagatctaaagttctggctgtccattaacctccaactatggtctttatttcttgtggtaatatgatgtgcctttccttgcctaaatcccttcctggtgtgtatcaacattatttaatgtcttctaattcagtcatttttttataagtatgtctataaacattgaactttaaaaaacttatttatttattccactactgtagcaattgacagattaaaaaaatgtaacttcataatttcttaccataacctcaatgtcttttttaaaaaataaaattaaaaatgaaaagag

SEQ ID NO: 23 - DNA, 3155 bp, Homo sapiens
agcgagcagtttgcagccctgctgctagtgaccaaggcagtcaaagcaggtgacatagatgccaaaactcggcggcggatcttcgatgctgtcggcttcaccttccccaatcgtctcctgaccaccaaggaggcgccggatggctgccctgaccatgttctgcgggctttgggtgtggccctgctggcctgcttctgcagtgaccctgaactggccgcccatccccaagtcctgaacaagattcccattcttagcaccttcctcacagcccggggggacccggacgatgctgcccgccgctccatgattgatgacacctaccagtgcctgacggctgtagcaggcacacccagagggcctcggcacctcattgctggtggcaccgtgtctgccctatgccaggcatacctggggcacggctatggctttgaccaggccctggcactcctggtggggctgctggctgctgccgagacacagtgctggaaggaggcggagcccgacctgctggccgtgttgcggggcctcagtgaggatttccagaaagctgaggatgccagcaagtttgagctctgccagctgctgcccctctttttgcccccgacaaccgtgccccctgaatgctaccgggatctgcaggccgggctggcacgcatcctgggaagcaagctgagctcctggcagcgcaaccctgcactgaagctggcagcccgcctggcacacgcctgcggctccgactggatcccggcgggcagctccgggagcaagttcctggccctgctggtgaatctggcgtgcgtggaagtgcggctggcactggaggagacgggcacggaggtgaaagaggatgtggtgaccgcctgctatgccctcatggagttggggatccaggaatgcactcgctgtgagcagtcactgcttaaggagccacagaaggtgcagctcgtgagcgtcatgaaggaggccataggggctgttatccactacctgctgcaggtggggtcagagaagcagaaggagccctttgtgtttgcctcggtgcggatcctgggtgcctggctggccgaggagacctcatccttgcgtaaggaggtgtgccagctgctgcccttcctcgtccgctatgccaagaccctctacgaggaggccgaggaggccaatgacctttcccagcaggtggccaacctggccatctcccccaccaccccagggcccacctggccaggagacgctctccggctcctcctgcctggctggtgccacctgaccgttgaagatgggccccgggagatcctgatcaaggaaggggccccctcgcttctgtgcaagtatttcctgcagcagtgggaactcacatcccctggccacgacacctcggtgctgcctgacagcgtggagattggcctgcagacctgctgccacatcttcctcaacctcgtggtcaccgcaccggggctgatcaagcgtgacgcctgcttcacatctctaatgaacaccctcatgacgtcgctaccagcactagtgcagcaacagggaaggctgcttctggctgctaatgtggccaccctggggctcctcatggcccggctccttagcacctctccagctcttcagggaacaccagcatcccgagggttcttcgcagctgccatcctcttcctatcacagtcccacgtggcgcgggccaccccgggctcagaccaggcagtgctagccctgtcccctgagtatgagggcatctgggccgacctgcaggagctctggttcctgggcatgcaggccttcaccggctgtgtgcctctgctgccctggctggcccccgctgccctgcgctcccgctggccgcaggagctgctccagctgctaggcagtgtcagccccaactctgtcaagcccgagatggtggccgcctatcagggtgtcctggtggagctggcgcgggccaaccggctgtgccgggaggccatgaggctgcaggcgggcgaggagacggccagccactaccgcatggctgccttggagcagtgcctgtcagagccctgaggggtgtccaccggggacagacccaggggcgggcagagagggaaggagggaggaggcatcttccctgaagcccccaatctggcccccccctccccagacttcctccccaaaacaccccagctttctggcttttctgagggcaagggcatggtgcccacccctcaagtgtaaggaactgcgttccgcccctcaggcccccatgggggcagggatcggcttggaaatcaacgtggttgtccccgccaggccggggaaggttggagcagcccccagggaggggggcactaggtgtcattgtgcccgatgtctggctcccctgcaggagggaggctccagggtaagacagggctggcaggagcagactgcctcagcccatgtgccctgccggccagggcgtgggctcccctcggctgtggtgcctcctctggccccccaggtccacgtcctttaaattggccctttggctcttgcccttggctcccttgggcagacagcaggcttaggccattgatatcgcagttcttcctatcagcttcagtgacccagggtctgaactgcctccatcctagggcaacctggggcagacaggcctggtggggggtggggaaacctccttccacctgagcttgcttgaagggacccagagtctttgggcccagatctttaaacctttgtgtcgtgttgcagcagagtgacgatgggggttggggggttatttattttgcctgtccttatccctgcttggacacctgagcatctgattcctgtccccctggtgccatctggcctggctggagccaggaacaggagggacacttccccagaatccgcatgtttccccagtgattacactccactgccaccgtggtgcctggctttaactcccacccctgctatgactcctctctgcagagacgcgactggcggctccagcagggactacctttcttataaacccagggggaccacacacacacacacacacacacacacacacacacacacacacacacactcttgatcccttgcttccctcccccagtgcgttctgtgatcgccaagttcaaagctgtgcacatgtggacactcaataaatgttcattggtgacgag

SEQ ID NO: 24 - DNA, 1724 bp, Homo sapiens
caacctcgtggtcaccgcaccggggctgatcaagcgtgacgcctgcttcacatctctaatgaacaccctcatgacgtcgctaccagcactagtgcagcaacagggaaggctgcttctggctgctaatgtggccaccctggggctcctcatggcccggctccttagcacctctccagctcttcagggaacaccagcatcccgagggttcttcgcagctgccatcctcttcctatcacagtcccacgtggcgcgggccaccccgggctcagaccaggcagtgctagccctgtcccctgagtatgagggcatctgggccgacctgcaggagctctggttcctgggcatgcaggccttcaccggctgtgtgcctctgctgccctggctggcccccgctgccctgcgctcccgctggccgcaggagctgctccagctgctaggcagtgtcagccccaactctgtcaagcccgagatggtggccgcctatcagggtgtcctggtggagctggcgcgggccaaccggctgtgccgggaggccatgaggctgcaggcgggcgaggagacggccagccactaccgcatggctgccttggagcagtgcctgtcagagccctgaggggtgtccaccggggacagacccaggggcgggcagagagggaaggagggaggaggcatcttccctgaagcccccaatctggcccccccctccccagacttcctccccaaaacaccccagctttctggcttttctgagggcaagggcatggtgcccacccctcaagtgtaaggaactgcgttccgcccctcaggcccccatgggggcagggatcggcttggaaatcaacgtggttgtccccgccaggccggggaaggttggagcagcccccagggaggggggcactaggtgtcattgtgcccgatgtctggctcccctgcaggagggaggctccagggtaagacagggctggcaggagcagactgcctcagcccatgtgccctgccggccagggcgtgggctcccctcggctgtggtgcctcctctggccccccaggtccacgtcctttaaattggccctttggctcttgcccttggctcccttgggcagacagcaggcttaggccattgatatcgcagttcttcctatcagcttcagtgacccagggtctgaactgcctccatcctagggcaacctggggcagacaggcctggtggggggtggggaaacctccttccacctgagcttgcttgaagggacccagagtctttgggcccagatctttaaacctttgtgtcgtgttgcagcagagtgacgatgggggttggggggttatttattttgcctgtccttatccctgcttggacacctgagcatctgattcctgtccccctggtgccatctggcctggctggagccaggaacaggagggacacttccccagaatccgcatgtttccccagtgattacactccactgccaccgtggtgcctggctttaactcccacccctgctatgactcctctctgcagagacgcgactggcggctccagcagggactacctttcttataaacccagggggaccacacacacacacacacacacacacacacacacacacacacacacacacactcttgatcccttgcttccctcccccagtgcgttctgtgatcgccaagttcaaagctgtgcacatgtggacactcaataaatgttcattggtgac

SEQ ID NO: 25 - DNA, 1070 bp, Homo sapiens
cttgacccagtggcaacactagctgcagttatgacagagaagtctccttttaccacaccaattggtcgaaaagatgaagcagatcttgcaaaatcagctttggccatggcggattcagaccacctgacgatctacaatgcatatctaggatggaagaaagcacgacaagaaggaggttatcgttctgaaatcacatactgccggaggaactttcttaatagaacatcactgttaaccctagaggatgtaaagcaggagttaataaagttggttaaggcagcaggattttcatcttccacaacttctaccagctgggaaggaaacagagcctcacagaccctctcattccaagaaattgcccttcttaaagctgtactggtggctggactgtatgacaatgtggggaagataatctatacaaagtcagtggatgttacagaaaaattggcttgcattgtggagacggcccaaggcaaagcacaagtacacccatcctcagtaaatcgagatttgcaaactcatggatggctcttataccaggagaagataaggtatgccagagtgtatttgagagaaactaccctaataaccccttttccatttttactttttggtggtgatatagaagttcagcaccgagaacgtcttctttctattgatggctggatctattttcaggcccctgtaaagatagctgtcattttcaagcagctgagagttctcattgattcagttttaagaaaaaagcttgaaaatccaaagatgtcccttgaaaatgacaagattctgcagatcattacggaattgataaaaacagagaataactgaaactgaaattcatggtcaactgctttaaaaattaagatgaagatacagtcatgaaattatctgaaaatgggtcatcacattaagtatttcattacttaaaatgttggtactagccattaacttaaaggtggtgggaaaaaagcacatactttaaacatgtataattttctagttcctttttaatgatgattattctgaatgtatttgccactacatttacaataaattctttggtattatgc

SEQ ID NO: 26 - DNA, 2496 bp, Homo sapiens
agcaagtaaatgtaacattgtctgtacccaaccccgaagaatctcagcagttagtttagccaacagagtatgtgatgaattgggctgtgaaaatggacctggaggaaggaattccttgtgtggatatcagatccggatggaatctcgagcttgtgaatctaccaggttactctattgtacaacaggggttttgctaaggaaacttcaagaagatggtcttctaagtaatgtgtctcatgttattgtagatgaggttcatgaaagaagtgtccagtcagacttcctactaattatcttgaaggaaattttacagaaacgttctgatctacacttgattctaatgagtgccactgtggacagcgaaaaattttctacatatttcacacactgccccattctcagaatttcaggaagaagttatcctgttgaggtttttcatcttgaagatataatagaagaaacaggctttgtactggaaaaagactcagaatattgtcagaaatttctggaagaggaagaagaagtaaccattaatgttacaagcaaagcagggggaataaaaaaatatcaggaatacatcccagttcagactggagcacatgctgatttaaatccattttaccaaaagtacagcagccgcactcagcatgctattctatacatgaatcctcataaaatcaacctggatctcattttggaacttcttgcatacttagataaaagtccccaattcagaaatattgaaggagcagtattgatctttttaccaggacttgctcatattcagcagttgtatgatcttctatcaaatgatagaagattttattctgaacgatataaagtgatagctctgcattctattctttcaacccaagatcaagctgcagcattcacacttccccctccaggagtcaggaagattgttttagcaaccaatattgcagagacgggtatcactattcctgatgttgtatttgtaattgatactggaagaacaaaagaaaataagtaccatgaaagcagtcagatgagttctttggtggagacgtttgtcagtaaagccagtgctttgcagcgccagggaagagctgggcgggtcagagatggcttctgtttccgaatgtacacaagagaaagatttgaaggctttatggattattctgttcctgaaatcttacgtgtacctttggaggaattatgccttcatattatgaaatgtaatcttggttctcctgaagatttcctctccaaagccttagatcctcctcagctccaagtgatcagcaatgcaatgaatttgctccgaaaaattggagcttgtgaattaaatgagcctaaactgactccgttgggccaacaccttgcagctttacctgtgaatgtcaagattggcaagatgcttatttttggtgccatatttggctgccttgacccagtggcaacactagctgcagttatgacagagaagtctccttttaccacaccaattggtcgaaaagatgaagcagatcttgcaaaatcagctttggccatggcggattcagaccacctgacgatctacaatgcatatctaggatggaagaaagcacgacaagaaggaggttatcgttctgaaatcacatactgccggaggaactttcttaatagaacatcactgttaaccctagaggatgtaaagcaggagttaataaagttggttaaggcagcaggattttcatcttccacaacttctaccagctgggaaggaaacagagcctcacagaccctctcattccaagaaattgcccttcttaaagctgtactggtggctggactgtatgacaatgtggggaagataatctatacaaagtcagtggatgttacagaaaaattggcttgcattgtggagacggcccaaggcaaagcacaagtacacccatcctcagtaaatcgagatttgcaaactcatggatggctcttataccaggagaagataaggtatgccagagtgtatttgagagaaactaccctaataaccccttttccagttttactttttggtggtgatatagaagttcagcaccgagaacgtcttctttctattgatggctggatctattttcaggcccctgtaaagatagctgtcattttcaagcagctgagagttctcattgattcagttttaagaaaaaagcttgaaaatccaaagatgtcccttgaaaatgacaagattctgcagatcattacggaattgataaaaacagagaataactgaaactgaaattcatggtcaactgctttaaaaattaagatgaagatacagtcatgaaattatctgaaaatgggtcatcacattaagtatttcattacttaaaatgttggtactagccattaacttaaaggtggtgggaaaaaagcacatactttaaacatgtataattttctagttcctttttaatgatgattattctgaatgtatttgccactacatttacaataaattctttggtattatgc

SEQ ID NO: 27 - DNA, 986 bp, Homo sapiens
ctttcccgtcctgctgctgctgctgctatcgggggatgtccagagctcggaggtgcccggggctgctgctgagggatcgggagggagtggggtcggcataggagatcgcttcaagattgaggggcgtgcagttgttccaggggtgaagcctcaggactggatctcggcggcccgagtgctggtagacggagaagagcacgtcggtttccttaagacagatgggagttttgtggttcatgatataccttctggatcttatgtagtggaagttgtatctccagcttacagatttgatcccgttcgagtggatatcacttcgaaaggaaaaatgagagcaagatatgtgaattacatcaaaacatcagaggttgtcagactgccctatcctctccaaatgaaatcttcaggtccaccttcttactttattaaaagggaatcgtggggctggacagactttctaatgaacccaatggttatgatgatggttcttcctttattgatatttgtgcttctgcctaaagtggtcaacacaagtgatcctgacatgagacgggaaatggagcagtcaatgaatatgctgaattccaaccatgagttgcctgatgtttctgagttcatgacaagactcttctcttcaaaatcatctggcaaatctagcagcggcagcagtaaaacaggcaaaagtggggctggcaaaaggaggtagtcaggccgtccagagctggcatttgcacaaacacggcaacactgggtggcatccaagtcttggaaaaccgtgtgaagcaactactataaacttgagtcatcccgacgttgatctcttacaactgtgtatgttaactttttagcacatgttttgtacttggtacacgagaaaacccagctttcatcttttgtctgtatgaggtcaatattgatgtcactgaattaattacagtgtcctatagaaaatgccattaataaattatatgaactactattacccc

SEQ ID NO: 28 - DNA, 212 bp, Homo sapiens
gcatgaaggccggccttcatggcctaattgattctagacctgcggccgcaggtctagaagaaatgaattcacaccagtgtgctctcagtgcggtgttctgtgacatcctttgctctctgaccaacttaatgacttttgtatgtgtgctctctttataatgtattttatatcactttaatttgtataaatgattttcttgtccgtgctacatg

SEQ ID NO: 29 - DNA, 11 bp, Homo sapiens
cttcatggcct

SEQ ID NO: 30 - DNA, 386 bp, Homo sapiens
tgattggaaacaattaattgtgggtgtctgagggggaaggtcgcagctttgggcagctttgagaagcggtacaagagttctgtgcctgtgtgtccagccctggagccagccagtgcatttattttaagctcttagaagcaactccttggcccaggaatgcgtgacccctgagatgggtccacgcatctctctacacttccttctctccgtgggatactggactcgtgcctctgcgcccattctcttctcacgcatatccatgagctttaatttcactttctgatcacggtacgtccataaagccagtattacacttaaatgaagtattcttttttgtaatcgttttttttagaaggtaaacaaatttaataaagctaccaataatg

SEQ ID NO: 31 - DNA, 3104 bp, Homo sapiens
ggaatagaggatttcaaaaagcatgcgttttttgaaggtctaaattgggaaaatatacgaaacctagaagcaccttatattcctgatgtgagcagtccctctgacacatccaacttcgacgtggatgacgacgtgctgagaaacacggaaatattacctcctggttctcacacaggcttttctggattacatttgccattcattggttttacattcacaacggaaagctgtttttctgatcgaggctctctgaagagcataatgcagtccaacacattaaccaaagatgaggatgtgcagcgggacctggagcacagcctgcagatggaagcttacgagaggaggattcggaggctggaacaggagaagctggagctgagcaggaagctgcaagagtccacccagaccgtgcagtccctccacggctcatctcgggccctcagcaattcaaaccgagataaagaaatcaaaaagctaaatgaagaaatcgaacgcttgaagaataaaatagcagattcaaacaggctggagcgacagcttgaggacacagtggcgcttcgccaagagcgtgaggactccacgcagcggctgcgggggctggagaagcagcaccgcgtggtccggcaggagaaggaggagctgcacaagcaactggttgaagcctcagagcggttgaaatcccaggccaaggaactcaaagatgcccatcagcagcgaaagctggccctgcaggagttctcggagctgaacgagcgcatggcagagctccgtgcccagaagcagaaggtgtcccggcagctgcgagacaaggaggaggagatggaggtggccacgcagaaggtggacgccatgcggcaggaaatgcggagagctgagaagctcaggaaagagctggaagctcagcttgatgatgctgttgctgaggcctccaaggagcgcaagcttcgtgagcacagcgagaacttctgcaagcaaatggaaagcgagctggaggccctcaaggtgaagcaaggaggccggggagcgggtgccaccttagagcaccagcaagagatttccaaaatcaaatccgagctggagaagaaagtcttattttatgaagaggaattggtcagacgtgaggcctcccatgtgctagaagtgaaaaatgtgaagaaggaggtgcatgattcagaaagccaccagctggccctgcagaaagaaatcttgatgttaaaagataagttagaaaagtcaaagcgagaacggcataacgagatggaggaggcagtaggtacaataaaagataaatacgaacgagaaagagcgatgctgtttgatgaaaacaagaagctaactgctgaaaatgaaaagctctgttcctttgtggataaactcacagctcaaaatagacagctggaggatgagctgcaggatctggcagccaagaaggagtcagtggcccactgggaagctcagattgcggaaatcattcagtgggtcagtgacgagaaagatgcccggggttaccttcaagctcttgcttccaagatgaccgaagagctcgaggctttgaggagttctagtctggggtcaagaacactggacccgctgtggaaggtgcgccgcagccagaagctggacatgtccgcgcggctggagctgcagtcggccctggaggcggagatccgggccaagcagcttgtccaggaggagctcaggaaggtcaaggacgccaacctcaccttggaaagcaaactaaaggattccgaagccaaaaacagagaattattagaagaaatggaaattttgaagaaaaagatggaagaaaaattcagagcagatactgggctcaaacttccagattttcaggattccatttttgagtatttcaacactgctcctcttgcacatgacctgacatttagaaccagctcagctagtgagcaagaaacacaagctccgaagccagaagcgtccccgtcgatgtctgtggctgcatcagagcagcaggaggacatggctcggcccccgcagaggccatccgctgtgccgttgcccaccacgcaggccctggctctggctggaccgaagccaaaagctcaccagttcagcatcaagtccttctccagccctactcagtgcagccactgcacctccctgatggttgggctgatccggcagggctacgcctgcgaggtgtgttcctttgcttgccacgtgtcctgcaaagacggtgccccccaggtgtgcccaatacctcccgagcagtccaagaggcctctgggcgtggacgtgcagcgaggcatcggaacagcctacaaaggccatgtcaaggtcccaaagcccacgggggtgaagaagggatggcagcgcgcatatgcagtcgtctgtgactgcaagctcttcctgtatgatctgcctgaaggaaaatccacccagcctggtgtcattgcgagccaagtcttggatctcagagatgacgagttttccgtgagctcagtcctggcctcagatgtcattcatgctacacgccgagatattccatgtatattcagggtgacggcctctctcttaggtgcaccttctaagaccagctcgctgctcattctgacagaaaatgagaatgaaaagaggaagtgggttgggattctagaaggactccagtccatccttcataaaaaccggctgaggaatcaggtcgtgcatgttcccttggaagcctacgacagctcgctgcctctcatcaaggccatcctgacagctgccatcgtggatgcagacaggattgcagtcggcctagaagaagggctctatgtcatagaggtcacccgagatgtgatcgtccgtgccgctgactgtaagaaggtacaccagatcgagcttgctcccagggagaagatcgtaatcctcctctgtggccggaaccaccatgtgcacctctatccgtggtcgtcccttgatggagcggaaggcagctttgacatcaagcttccggaaaccaaaggctgccagctcatggccacggccacactcaagaggaactctggcacctgcctgtttgtggccgtgaaacggctgatcctttgctatgagatccagaaaataaagccatattgaatgat

SEQ ID NO: 32 - DNA, 3104 bp, Homo sapiens
  misc_feature 2354: n = a,c,g, or t
ggaatagaggatttcaaaaagcatgcgttttttgaaggtctaaattgggaaaatatacgaaacctagaagcaccttatattcctgatgtgagcagtccctctgacacatccaacttcgacgtggatgacgacgtgctgagaaacacggaaatattacctcctggttctcacacaggcttttctggattacatttgccattcattggttttacattcacaacggaaagctgtttttctgatcgaggctctctgaagagcataatgcagtccaacacattaaccaaagatgaggatgtgcagcgggacctggagcacagcctgcagatggaagcttacgagaggaggattcggaggctggaacaggagaagctggagctgagcaggaagctgcaagagtccacccagaccgtgcagtccctccacggctcatctcgggccctcagcaattcaaaccgagataaagaaatcaaaaagctaaatgaagaaatcgaacgcttgaagaataaaatagcagattcaaacaggctggagcgacagcttgaggacacagtggcgcttcgccaagagcgtgaggactccacgcagcggctgcgggggctggagaagcagcaccgcgtggtccggcaggagaaggaggagctgcacaagcaactggttgaagcctcagagcggttgaaatcccaggccaaggaactcaaagatgcccatcagcagcgaaagctggccctgcaggagttctcggagctgaacgagcgcatggcagagctccgtgcccagaagcagaaggtgtcccggcagctgcgagacaaggaggaggagatggaggtggccacgcagaaggtggacgccatgcggcaggaaatgcggagagctgagaagctcaggaaagagctggaagctcagcttgatgatgctgttgctgaggcctccaaggagcgcaagcttcgtgagcacagcgagaacttctgcaagcaaatggaaagcgagctggaggccctcaaggtgaagcaaggaggccggggagcgggtgccaccttagagcaccagcaagagatttccaaaatcaaatccgagctggagaagaaagtcttattttatgaagaggaattggtcagacgtgaggcctcccatgtgctagaagtgaaaaatgtgaagaaggaggtgcatgattcagaaagccaccagctggccctgcagaaagaaatcttgatgttaaaagataagttagaaaagtcaaagcgagaacggcataacgagatggaggaggcagtaggtacaataaaagataaatacgaacgagaaagagcgatgctgtttgatgaaaacaagaagctaactgctgaaaatgaaaagctctgttcctttgtggataaactcacagctcaaaatagacagctggaggatgagctgcaggatctggcagccaagaaggagtcagtggcccactgggaagctcagattgcggaaatcattcagtgggtcagtgacgagaaagatgcccggggttaccttcaagctcttgcttccaagatgaccgaagagctcgaggctttgaggagttctagtctggggtcaagaacactggacccgctgtggaaggtgcgccgcagccagaagctggacatgtccgcgcggctggagctgcagtcggccctggaggcggagatccgggccaagcagcttgtccaggaggagctcaggaaggtcaaggacgccaacctcaccttggaaagcaaaccaatggattccgaagccaaaaacagagaattattagaagaaatggaaattttgaagaaaaagatggaagaaaaattcagagcagatactgggctcaaacttccagattttcaggattccatttttgagtatttcaacactgctcctcttgcacatgacctgacatttagaaccagctcagctagtgagcaagaaacacaagctccgaagccagaagcgtccccgtcgatgtctgtggctgcatcagagcagcaggaggacatggctcggcccccgcagaggccatccgctgtgccgttgcccaccacgcaggccctggctctggctggaccgaagccaaaagctcaccagttcagcatcaagtccttctccagccctactcagtgcagccactgcacctccctgatggttgggctgatccggcagggctacgcctgcgaggtgtgttcctttgcttgccacgtgtcctgcaaagacggtgccccccaggtgtgcccaatacctcccgagcagtccaagaggcctctgggcgtggacgtgcagcgaggcatcggaacagcctacaaaggccatgtcaaggtcccaaagcccacgggggtgaagaagggatggcagcncgcatatgcagtcgtctgtgactgcaagctcttcctgtatgatctgcctgaaggaaaatccacccagcctggtgtcattgcgagccaagtcttggatctcagagatgacgagttttccgtgagctcagtcctggcctcagatgtcattcatgctacacgccgagatattccatgtatattcagggtgacggcctctctcttaggtgcaccttctaagaccagctcgctgctcattctgacagaaaatgagaatgaaaagaggaagtgggttgggattctagaaggactccagtccatccttcataaaaaccggctgaggaatcaggtcgtgcatgttcccttggaagcctacgacagctcgctgcctctcatcaaggccatcctgacagctgccatcgtggatgcagacaggattgcagtcggcctagaagaagggctctatgtcatagaggtcacccgagatgtgatcgtccgtgccgctgactgtaagaaggtacaccagatcgagcttgctcccagggagaagatcgtaatcctcctctgtggccggaaccaccatgtgcacctctatccgtggtcgtcccttgatggagcggaaggcagctttgacatcaagcttccggaaaccaaaggctgccagctcatggccacggccacactcaagaggagctctggcacctgcctgtttgtggccgtgaaacggctgatcctttgctatgagatccagaaaataaagccatattgaatgat

SEQ ID NO: 33 - DNA, 72 bp, Homo sapiens
attgaattctagacctgcggccgcaggtctagtaggccatgaaggccgaattcggccttcatggcctacagg

SEQ ID NO: 34 - DNA, 1038 bp, Homo sapiens
gagagctgcaggagtaaggacaggaaggtgctgtacacaggagcagagcgcgacgtgcgggcggagtgcggtctgctccttagccctgtcagtggggacgtgcatgcttgtccctttggcgggagtgttggtgacggggtaggcatagggggtgagagtgctgataagaaggatgaggagaatgagctggatcaggaaaagagagtggagtatgcagtgctcgatgagttagaagattttactgacaatttggagctagatgaagaaggagcaggcgggttcacggctaaagcaatcgttcagagagacagagtggatgaagaggccttgaatttcccctacgaggatgactttgacaacgatgtggatgctctgctggaagaaggcctttgtgcccccaaaaagaggcgaacagaggaaaaatatggcggagacagcgaccatccgtccgatggagagacaagtgtgcagccgatgatgaccaagattaaaacagtgctcaaaagtcgtggccgcccacctacagagccgctgcccgacgggtggatcatgacattccataactctggagtcccggtgtacctacacagagagtctcgggtggtcacctggtccaggccatacttcttgggaacgggaagcatacggaaacacgaccctcctctgagtagcatcccttgtctgcattataagaaaatgaaggacaacgaggaacgggagcaaagcagtgacctcacccctagtggggatgtgtcccccgtcaagcccctgagccgatctgcagagctggagtttcccctggatgagcctgactctatgggtgctgacccggggcccccggacgagaaagacccactaggggctgaggcagcccctggggccctggggcaggtgaaggccaaagtcgaggtgtgcaaagatgaatccgttgatctcgaggaatttcgaagctacctggagaagcgttttgactttgagcaagttactgtgaaaaaattcaggacttgggctgagcggcggcaattcaatcgggaaatg

SEQ ID NO: 35 - DNA, 687 bp, Homo sapiens
tcccgattgaattgccgccgctcagcccaagtcctgaattttttcacagtaacttgctcaaagtcaaaacgcttctccaggtagcttcgaaattcctcgagatcaacggattcatctttgcacacctcgactttggccttcacctgccccagggccccaggggctgcctcagcccctagtgggtctttctcgtccgggggccccgggtcagcacccatagagtcaggctcatccaggggaaactccagctctgcagatcggctcaggggcttgacgggggacacatccccactaggggtgaggtcactgctttgctcccgttcctcgttgtccttcattttcttataatgcagacaagggatgctactcagaggagggtcgtgtttccgtatgcttcccgttcccaagaagtatggcctggaccaggtgaccacccgagactctctgtgtaggtacaccgggactccagagttatggaatgtcatgatccacccgtcgggcagcggctctgtaggtgggcggccacgacttttgagcactgttttaatcttggtcatcatcggctgcacacttgtctctccatcggacggatggtcgctgtctccgccatatttttcctctgttcgcctctttttgggggcacaaaggccttcttccagcagagcatcccgattgaattctagacct

SEQ ID NO: 36 - DNA, 960 bp, Homo sapiens
ctgatcatctgatggggcagtttcaatcaccaagcatcgttctctttcctgttctggaattttgttttggagctctttcccctagtgaccaccagttagtttctgagggatggaacaaaaatgcagcttgccctttctatgtggtgcgtgttcaggccttgacagattttatcaaaaggaaactattttatttaaatggaggctgagtggtgagtagatgtgtcttggtatggaggaaaagggcatgctgcatcttcttcctgacctccggggtctctggccttttgtttccttgctcactgaggggtctgtctaaccaagcaggctagatagtgctggcacacattgccttctttctcattgggtccagcaatgaagataagtgtttgggtttttttttttttcctccacaatgtagcaaattctcaggaaatacagtttatatcttcctcctatgctcttccagtcaccaactacttatgcggctactttgtccagggcacaaaatgccgtggcagtatctaactaaacccccacaaaactgcttaataacagttttgaatgtgagaaacttagataatttaaatataaggtacaggttttaatttctgagtttcttcttttctatttttattaaaaagaaaataattttcagatttaattgaattggaaaaaaacaatacttcccaccagaattatatatcctgaaaattgtatttttgttatataaacaacttttaagaaagatcattatccttttctctacctaaatatgaggagtcttagcataatgacaaatatttataatttttcaattaatggtacttgctggatccacactaacatctttgctaataatctcattgtttcttccaactgattcctaacactatatcccacatcttctttctagtcttttatctagaatatgcaacctaaaataaaaatggtggcgtctcc

SEQ ID NO: 37 - DNA, 684 bp, Homo sapiens
cagagcactaaatattttaaggcaagtccataggtctgaatctcttaagaattctcggcctctgtgggatttagggaagcattataaatgcattaatccttatagtcaattctgtgcctaggattttgccagggaacagttcactgactaggaaaagcactacattttaaattcagcattagtgcattgggaaggatctttactgctttgtgcttggcatgtcattattttccatttgacattagggcctttccaaaatgaatgtgaggaattgctttcacttcaagactttccttcttttcactaaaactctagaaggtgttacaagggggagggaaggggggcaaagtccttgaacattttctttggctcgtgccatgttatgatcatataccttttaaataaggggaaatagtatctttaaagttaatgtctagccaagagtttagtaaacgaagaattaaactgcactgttgatcggtgctttgtgtaaatacatctttaacatttgggtggagaggggccttaagaaggacagttcattgtaggaaagcaattctgtacatgagtttaagcattcttgttgcattgtctctgcagattctatttttgtttacaatattaaaatgtatgttagcaaaatgggtggattttcaaataaaatgcagcttccacaaaagtttt

SEQ ID NO: 38 - DNA, 1510 bp, Homo sapiens
  misc_feature 56: n = a,c,g, or t
cgccgcttttttttttttttttttttttttttttttttttttttttttttaatttnggtagttgtttttatggatgtgaaaaatattaccactgcaactagcaagaactataaatgatacattattgcaagtgttctaaaaaatcagaacaaaactaatttattatagttctgtcttcattatacaccacgtgttggtgagttaaacacaacaaaattgtcttttcttttaaaagtgtctactaaagataaaaagaataagataacaattaacatgtagtttgttacattaaaaaatctgatatacatatttctattgcctgttagcttgttctaagcctctttaactattacaacaaaaaaaaaaaaaggaaagaaaaagaaaattcattgtttaaaggcaaacattcaattcagttgatacaacattacagtacagtcaactaacatcattcaacgaaggtaacaagtctagccttagcttcttgagttaaaagtctatagaccagattgctacaaaagtttcaatgctgcttcaaaaccgtatgttagctttttggaggacaaagtactttctacggatggcttcagaaggggtcatgctactggtaaaagcacaggggaaccccatcctgtcattaatcattttattgagcactgtagttagaacagcattattgagtttagcacaacaactaaaataaaataataatataataacaatcataataatgataagaataaaaaccaaacacagactggaagcctagagtcgctggcagccgtgtcaaacccttgcgatacgctatactaaaaaaatttgaaatatccacccgtcctctccactctgccacaaactagcaaagtcaaaaatacaaaagtcttcaacttgttcacttttgcagaataaagcaaaaacgtctttgtgctccttactaccagaagcaaaatatcctctgagttaccacatgtaatagcttctggatgtgtcgacctgggttggcttggtgtctgcagaaccatctttgtctttctcgctgtcaccttcccagaggttaatgagtggtgggtacagctcatttagtgggattgaagaggttttttgcatatacttttttaatgagtggtggtagttttttctcttaaatcttttggcaaagtacacagcaatggacgcaaggctaatgacggccaacatagaccccattactgcagcaagggctgtactggtttcttgatcagagatgtccactgcgaaggcggcatttttggttgtgacatttacgcatgacttttgagtctgctgatgaatattggacactgtgagacacacttcataatctgtggaaggctgcagatgcgttaggttgtattcatggacatcgactgggaccctggcagtatatgttatgtgagggttatcaatcttcatggtggcagacgaccattttaagtttgacgtcatgacattggaattaactttccaggactcccgattgaattctagacct

SEQ ID NO: 39 - DNA, 1297 bp, Homo sapiens
gagggcacttaatcccaatgaactgtatgcttaaaaataatttaaatgataaactttgtgttatgtatactttaccacaataagaaaaagtattttagtactagtggtaaatagtttttatttaatagacttatattttaaagcttaaaaataatttagcttctagagtattacgtttttcttcatgggaacttcaaaaagcaagtcactaaatccaagaattttaaagaaaaaacccaaatacatgatttatgctgcatctggtatagatttttaaaagactagtcaatctaagctctaaactattaaatgacaaaccatttcatatgtcattgcatattcctatgtaccacattctcatatttctgttatgggcatgaaggggtgtttgatgcttccatgccataataaccatgactatcacaaccattgaaataaaggttcttgcagtattttcaggatggtcccagaaatttaaattaatctctcatccattggcttttgctactttaggttaatattaaaatataacatacatttttggggtttatgctgttagctccaaaccaaaagattttggaaatttattttggaaattttgtgtttagaatatgaataaatctgcttattcagaaaaattaaaccttgataacttgggacctcctattcctgtatgttctctgacatacattgagggatttggctctcttttgtttatttgttttactagtcagacattcctttggctgcccatacttaattctgttgggtgtttccgcccccgccctcagcttctgcagctactctgatcaacatccgcaatgccaggaaacactttgaaaagctggaaagagtggatggaccaaagcagtgtcttctcatgcgctaaacattgatgaatattgtttcacacaaaaattaaaagtttcctaattaatgttgtattcatatatgtaggctctgaaatgttgtgatgcttattgcttctgtatttcttctctactccctagtcttaatgtttaaccttgaatgctattaacttaaatagccattgaggagttagaagatgaattgttcatgaagtcggtgttacataaaagtaggtgatatgtaagttttctgataacaaggttctaatagtgtttaaatgtactggtaacctggttccaatagttgtgtttgcccaagcctttctcggcatcatcttgtattccttatcagatagtaagtaacctgtaagtttggagtattactgttttctcagcatgcattaaaaatattccttaacttcaattgt

SEQ ID NO: 40 - DNA, 1659 bp, Homo sapiens
acctcattccgagctgcaccccatgaaagttttattcctcattccaaagaacaacccaccgacgttggaaggaaactacagtaaacccctcaaggagtttgtggaggcctgtttgaataaggagccgagctttagacccactgctaaggagttattgaagcacaagtttatactacgcaatgcaaagaaaacttcctacttgaccgagctcatcgacaggtacaagagatggaaggccgagcagagccatgacgactcgagctccgaggattccgacgcggaaacagatggccaagcctcggggggcagtgattctggggactggatcttcacaatccgagaaaaagatcccaagaatctcgagaatggagctcttcagccatcggacttggacagaaataagatgaaagacatcccaaagaggcctttctctcagtgtttatctacaattatttctcctctgtttgcagagttgaaggagaagagccaggcgtgcggagggaacttggggtccattgaagagctgcgaggggccatctacctagcggaggaggcgtgccctggcatctccgacaccatggtggcccagctcgtgcagcggctccagagatactctctaagtggtggaggaacttcatcccactgaaattcctttggcatttggggttttgtttttccttttttccttcttcatcctcctccttttttaaaagtcaacgagagccttcgctgactccaccgaagaggtgcgccactgggagccaccccagcgccaggcgcccgtccagggacacacacagtcttcactgtgctgcagccagatgaagtctctcagatgggtggggagggtcagctccttccagcgatcattttattttattttattacttttgtttttaattttaaccatagtgcacatattccaggaaagtgtctttaaaaacaaaaacaaaccctgaaatgtatatttgggattatgataaggcaactaaagacatgaaacctcaggtatcctgctttaagttgataactccctctgggagctggagaatcgctctggtggatgggtgtacagatttgtatataatgtcatttttacggaaaccctttcggcgtgcataaggaatcactgtgtacaaactggccaagtgcttctgtagataacgtcagtggagtaaatattcgacaggccataacttgagtctattgccttgcctttattacatgtacattttgaattctgtgaccagtgatttgggttttattttgtatttgcagggtttgtcattaataattaatgcccctctcttacagaacactcctatttgtacctcaacaaatgcaaattttccccgtttgccctacgccccttttggtacacctagaggttgatttcctttttcatcgatggtactatttcttagtgttttaaattggaacatatcttgcctcatgaagctttaaattataattttcagtttctccccatgaagcgctctcgtctgacatttgtttggaatcgtgccactgctggtctgcgccagatgtaccgtcctttccaatacgattttctgttgcaccttgtagtggattctgcatatcatctttcccacctaaaaatgtctgaatgcttacacaaataaattttataacacgctt

SEQ ID NO: 41 - DNA, 334 bp, Homo sapiens
ctttatttatgcaaaaccacctcagaatccagtttaccctgtgctgtccagcttctcccttgggaaaaagtctctcctgtttctctctcctccttccacctcccctccctccatcacctcacgcctttctgttccttgtcctcaccttactcccctcaggaccctaccccaccctctttgaaaagacaaagctctgcctacatagaagactttttttattttaaccaaagttactgttgtttacagtgagtttggggaaaaaaaataaaataaaaatggctttcccagtccttgcatcaacgggatgccacatttcataactgtttttaatggt

SEQ ID NO: 42 - DNA, 2456 bp, Homo sapiens
aggtctagaattcaatcgggagagagatactgcctggttcttacagacacagattatgtcatccttgcagccttcacccaaagttgctccctccttctagggcattttgttttcctacttaataccaagtgtcagcatgttagtaataaacaggtgtctctaccattagtcaaaggtgggagttaagcctttcatctttgtagctttctccagtacctaaccatgatttacttcatgggaagtccctcaaagtactattaattatcctgtgttctcctgccttgcctcttaacaaaaattctgctgttcctgattatttccattttaccagtgttttgttccttttctatccaggcagcataattcgttgtatgaggcgcctggaagaattgcttcgacaaatgtgtcaagcagcaaaagccattggaaacactgagctggaaaataaatttgcagaaggtcagtatcaaatggataagctgtttctaatttagacaaatttggtgaagcaaatcttgagccctggaccacaacctaggaggacgttttgagatgttcttcactgcattgtcatggagagctatctactagtgtttctataaaatttagtgtgttgggggaaaagttgagattttatatatacatgcatttacgtatattaattgtacgctaactacatgccaggcattgttttaagcactaggggatatagtgaacaaaaagacacccctgccttcatggagtttacattctagtgtggggagatagacaataagtcaacaattaaatttatcagatggtgataagtctgtaagataaaaacaaagcagaaaagacaatagaattggcagatggatatgatggtctagggcctccacagggaaggtggcagttaaggcctttggtgtatgcttgatgtacgtgaacaccagcaagaggccagtgtggctggagcagaatgggcagtgagtagaggagtaggggttgaagtgagaaaggaaatgattccatagttcccagccccaggcttctcaactctgcagtgactggaggtgtggagtttgggagtgacctgccccaacttggactttacaaggtaattgttgctcttacattcagggcaagtctgtagagtagcacagtagaagtggggagaacagatcaagaaaggatggctaaaccaaggtggtagtaatggagtggtggtgggggggcaaggggcataagcttcagtcctgtctactgactcttgaccaagaaaaaggactaagttaatcaaagaatataaccacattgttgctgagtcagtcaatgctagtgatttctgcaaacaacttagtgtcctaagaagaggtttgcaaaaactggctgatatttccacagttgataaatgtaggcctgtttaatgactcagaatttaagtgtaggtgtcaaagttttaaaaataatttgtaatcaaaatttgtatttgtccttccttggcctagaaagaatttcacatgggaactgaaaaaaaagtgtcttctgatataggttgaaaatccaagtctttggattttacatttctttagacagtttagtccttccctataattttttttatttttatttttatttatttatttagtgtgtggagacagagtttcgctcttgttgccccaggctggagtgcaatggcgcaatctcggctcactgcaacctccacatccacctcccaggttcaagcgattctcctgcctcagcctcctgagtagctgaactacaggcatgcgccaccacgcccggctgattttgtatttctagtagagacggggtttctccatgttggtcgggctgctcttgaactcctgacctcaggtgatccgctcgcctcggcctcccagagtgctgggattacaggcatgagctactgcgcccgacctagcatttatctttttaaacagttctagacacctctttcctggccagcccccatggagtatttcagagtcaaaagaacaggggtctggcttgtatgttttccacctcacagaggtggctgcaaattcctctaggtgttcagcaaggtgtttgactttctaggctgctcgcttaccagttgaatcagggttggtatactggctttaaaatttcggtagaggcaagttaggtgttttgtggtcttgaaagtttaaaccttactttcttttctcttaggaatcaccaaaatcaagagagatattgtgtttgctgccagcctctacttgtagagtcagctaaaggaatgtgagattttaaattattgaccacctgtttgattacagttgactacaaatgcctgcaagtgtggatttggttctcccatacattttaatatgtattatatttaaatcaaacatcattcatagaaagcatataacatacatgtttatacataagcataacatttttttaataaaaatgtatacaggtggggc

SEQ ID NO: 43 - DNA, 698 bp, Homo sapiens
agccattgggacaggaaatgccaaacaacacccagataaggttgctgaagccataattgatgccattgaagactttgtccagaaaggatcagcccagtctgtgaaaaaagttaaagttgttatctttctgcctcaagtactggatgtgttttatgccaacatgaagaaaagagaagggactcagctttcttcccaacagtctgtgatgtctaaacttgcatcatttttgggcttttcaaagcaatctccccaaaaaaagaatcatttggttttggaaaagaaaacagaatcagcaacttttcgggtgtgtggtgaaaatgtcacgtgtgtggaatacgctatctcctggctacaagacctgattgaaaaagaacagtgtccttacaccagtgaagatgagtgcatcaaagactttgatgaaaaggagtatcaggagttgaatgagctgcagaagaagttaaatattaacatttccctggaccataagagacctttgattaaggttttgggaattagcagagatgtgatgcaggctagagatgaaattgaggcgatgatcaagagagttcgattggccaaagaacaggaatcccgggcagattgtatcagtgagtttatagaatggcagtataatgacaataacacttctcattgttttaacaaaatgaccaatctgaaattagaggatgcaaggagag

SEQ ID NO: 44 - DNA, 1346 bp, Homo sapiens
cgaggcgtctgcacccacacgctcacgaagcatcaggagcctgtctatagcgtagctttcagccctgatgggaagtacttggccagtggatccttcgacaagtgcgtccatatctggaatactcagagtggaaatcttgtccacagctaccgaggcactggcggcatcttcgaggtgtgctggaacgcccgaggagacaaagtgggtgccagcgcgtccgacggctctgtgtgtgttttggatctgcggaagtaaccacaaaatattatcgaaaaaagaaaagaattctaatgaccagccgtgaatgtgtagggttgcagctctattctccaaaactgtaggaacttgacttgcgttagagtgtactctgaaaccaactcgtctctggccgcaggagtctatatgttttcgtaatcttcatcaagaagtttttaaaaggcaagcaaaaacagaagcaaatcatatcaaacggggatagaatggtttccactgaggacattcagcctgggaaggaggaagtcaccagctcgaggcgtgtggattggtttccacccggaacaggctctgtgatggctgaatggaaagaaacgtaaaaagctgtgccaaaaaaaaagcaaaatgctgtgataaaccaaacagggaagggggaaaaaccctcctccttgggattttttttttttgttttccctaacaatttggacactacaattgctctcacaaaggaggttcaaagaccagtttgtaccgatgaaacgcgcaactttgtaatcccaacactttctattttctagaatcttctttgttcattgggtggtttttcagtcggctggaattctatcttctgggggccttccgtctgagatggaagctgtcttgggcttgttgtctcttccttctgttgctccctgcccctccccctgcctttccactctgtctggtgagctctgctttttcagtgcaccatcaagagatgcagccccgtggacatgaagacacaatctcccacggacagctttcccccttccgccctctcccaccctctcctccccttgcgctcgcgctcgcgctcgctttctcactggcgtgctctctttctctctctctctccctctgtacctttctcatagttgcttcagatcttaggtctcaagggcactttggcgcgtagtaagtgctttatgtaagaaggcagggcaggggggctttttacaggagaaaaaaaaatgacttataagagaaagagcctggagtatttttggaaaaaaaaataatatttttatgttaaaacaattttaaaatcttaaaatggccatcagacatagagagctttgtgtgattcatgtttt

SEQ ID NO: 45 - DNA, 1908 bp, Homo sapiens
gacaagcttcaaaattgtaaagatgatgaacagagaaagaaagttgaaactctcaaagatacaacaaatagcatggtagaatcaattaaacactgcattgtgttgctacagattgctaaaagtactattaatcctgtagatgcaatataccagcctagtcccttggaacctgtgatcagcacaatgccttcccagactgccttacctccagaacccgctcagttgtgtaagtcagagcagcgtccatcttccttacctgttggacctgtgttagctaccttgggacatcatcagactccaacaccaaatagtacaggcagtgggaactcaccacctagcagcagtctgactcctcccagccatgtcaacttgtctccaaatacagtcccagagttctcttactctagcagtgaagatgagttctatgatgctgatgaattccatcaaagtggctcgtccccaaagcgcttaatagattcttctggatctgcctcagtcttgacacacagcagctccggaaatagcttaaaacgcccagataccacagagtctctgaattcctccatgtccaatggcacaagcgatgctgatctttttgactcacatgacgacagagatgatgatggggaggctgggtcagtggaggagcacaagagcgttatcatgcacctcttatcacaagtcaggctggggatggacctcacaaaggtagttcttccaacgtttattctcgagagaagatctctgttagaaatgtatgcagactttttcgcacatccagacctgttcgtgagcattagtgatcagaaggatcccagggatcgaatggttcaggttgtgaaatggtacctctcggccttccatgcaggaaggagaggatcggtggccaaaaagccgtacaatcctattttgggtgagatctttcagtgtcactggacgttgccgaatgatactgaagagaacgcagagctcgtttcagaagggccggttccctgggtttctaagaacagtgtaacatttgtggctgagcaagtttcccaccatccgcccatttcagccttttatgctgagtgttttaacaagaagatacaattcaatgctcatatctggactaaatcaaaattccttgggatgtcaattggggtacacaacataggtcagggctgtgtctcgtgtctggagtacgatgagcactacatcctcacgttccccaatggctatggaaggtctatcctgacagtgccctgggtggaattgggaggagaatgcaatatcaactgctccaaaacgggttacagcgcaaacatcgtcttccacactaagcctttctatgggggcaagaagcacagaattactgcagagattttttctccgaatgacaagaaatccttctgctcaattgaaggggaatggaatggtatcatgtatgcaaaatacgcaacaggggaaaacactgtctttgtagacaccaagaagttgcctataatcaagaaaaaggtgaggaagttggaagatcagaatgagtatgagtcccgcacctttggaaggatgtcactttcaatttaaaaatcagagacattgatgcagcaacggaagcaaagcacagacttgaagaaagacaaagagcagaagcccgagaaaggaaggagaaggaaattcagtgggagacgaagctctttcacgaagatggcgaatgctgggtttaccatgaacctttactgaatcgtcttggtgctgtgaaacattagccgcaacccgattccacacctggtgaccagggcagtaggcgtaattaatcaacaatcgatctttcttcaggagaacttgcacttccttcttaacgcatgggtcctatctcaaggatactggacttgacacccagatgaaccatttaagtggaaaccgctt

SEQ ID NO: 46 - DNA, 1725 bp, Homo sapiens
gggaccgctgggaaggcgaggacgaggacgaggacgtcaaggataactgggatgacgatgatgatgaaaaaaaagaggaagcagaagtaaaaccagaggtaaaaatttcagaaaagaaaaaaatagcagagaagataaaagagaaagaacggcaacagaagaaaaggcaagaagaaattaaaaagaggttagaagaacccgaagaacctaaagtgctaacaccagaagaacaattagcagataaactgcggctaaagaaattacaggaagagtcagacctcgaattagcaaaggaaacttttggtgttaataatgcagtttatggaatagatgctatgaacccatcttcaagagatgactttacagagtttggaaagttactaaaagataaaattacacaatatgaaaagtcactatattatgccagttttttggaagtcttagttcgagatgtgtgtatttcattggaaattgatgacttgaaaaaaattaccaattcactgactgtgctttgcagtgaaaaacagaagcaagaaaagcaaagcaaagccaaaaagaagaagaaaggtgtggttcctggagggggattaaaagccaccatgaaagatgatctggcagattatggtggttatgatggaggatatgtacaagactatgaagacttcatgtgacattttatcttttcttggtgtcatctttatgttgcccacaatcccttgaacatgtagcacaacttcctttcctttcagttctgccaaatgctacaatcagaagtgcagtatcttttgtgctggttatttaaccccttgacacttaggtgctaatgtgcaaatgagggaacttggatcttgctgccaaggggttaaaattgggaacctaagttgctactaaatcatagttcaaaacctaataatgttgtcgttgttgctatctgatttcatagcagcagtcactaaattggaaacaaaaggttgcaacgtgacaaaaaaattgtgtagtatttaccagcaccattcagtaatacagccttaaccatacctccttgaactacttcataacttgtcaagaaaagcagtttgcagcaagggcatgtggtgtgcacctagtattaaaattgctttgtcttaaaattgaacatgaggatattaaaaatacattgtgaagaagactgcttatctcagagtgaagatactgcggctgaaaagcactagtttgatataaaattaaaatgaccaaaaccctccaactttgaagctaaagaaggtaaacctttccattattgcattacatgttgtggaatctctcgagtgcaaagactgtctagttatttatcaggctatttctactgatgaactgcttcaggtgggggagggaaacttatttttatttgcctgatttaagtgtctgagaaacaaatctttgttctcttaggctgcaatggaacaactttaccagggttttggcatttcctttcctttcctttataaaacatgctcagcaaactgcaccagttaactacagtttggtaaattgttatgttaacaattatgacatctgcaatgttttataaagcaactaatttaataaaatcactgttgtgaggacttaaattttgtgttacctcccaagagatactttttgagagtatagaacacagctcttgggagtacagttctctacgttctctactaaatcttaataaatgcttgacatagttacagcttt

SEQ ID NO: 47 - DNA, 1444 bp, Homo sapiens
aatccttcatggcctagaaataaatatcttccttcaatagatgaaaatgaaaatacagaaaaaagagaagcagttgtcaaatttaaaagttttgaatcactccccaatgtctgatgcctctgtcaattttgactacaaatctccatccccatttgactgcagcactgatcaagaagagaaaattgaagatgttgctagtcactgtctgcctcagaaggacctgtatactgctgaagaggaagctgctaccctttttcctaggaaaatgacatcccataatgggatggaggacagtggaggaggaggtactggagtgaagaagaaacggaagaaaaaggagccaggagaccaagagggtgcagcaaagggaagcaaggacagagagcccaagccaaagaggaaacgagaaccgaaagagccaaaggaacccagaaaggccaaggagccgaagaaggccaaggagcacaaggagccgaagcaaaaagatggggcaaagaaggcacggaagccccgggaggcctcgggcaccaaggaggccaaagagaagaggagctgcactgactctgcagccaggacgaagtccaggaaggccagaaacgacgctcgggaaggcaagtaaagcgcagaaaatacaatgaggacctggacttcaaagtggtggatgatgatggggaaacaattgctgttcttggagctggtcgaacatctgcactctcagcctctacactggcctggcaggcggaggtatggcctttgcatgaggttactgaccttggctggacagtcattttgacctagatgacagacgtgtttcttggcctttgctaaagcataagtcagatcattttaactgctgcttgtggccttcgattgacttcctgttgcattgggaatgacattcagactccttactgtgctcagcaggaccctccatgatcacactctcgccttgttttgccaaattcttcatttttttagataaacaatttttccctgtctcattactctccagccaaaagactggctgtcttttaatgccttgaactaacagttcttctctacccatagacctttgcctctgttgttccttctgcttgggatgctttacgtgactggtttatcagttttgcctaaaatgttatctccttagagaggttcttcctgatcttttatctaaagtagattcctgcccctcatcccaatgatattctgtttcagccccttgtgtacttccttaaagcacttaccacaacacaaattgcatttgaatgtgtctgatctctgattttgttttacttgtctctcattaaaatgtgaaagtcttggccgggcattgtggctcacacctgtaatcccagcacttttgggagtccgaggcaggcagatcacttgaggccaggagttcgagatcaacatgggcaacatggcaaaaccccatctctac

SEQ ID NO: 48 - DNA, 929 bp, Homo sapiens
ccagattcatccagacgatgcttgttgatctagctattttcttttatttgaaaaatcaactgttagacacttactatttctatctttcatttagtgtacttactcattatcaatttatttactttaaattctgggatacaagcacagaacgtgccggtttattacataggtatacatgtgccatggtggtttgctacacctatcaacccgtcatctaggttttaagccccgcatgcattagctatttgtcctgatgctctccctcctctcatcccccaccctgagacaggcctcagtgtgtgtcattcccctccctatgtccatgtgttctcgttgttcaggtcccacttatgagagagaacatgtgtacacttattatttattacttctcccatctatattaatatgtattaatttattaatacttctgggagaagagtaatacttctgccatcctgtccccacaataaaaacccagagtaagaatctcttttcagataaatatattgaaaaaaggaaaagtaaacgctaaattaaaattggggtttgaggagtgttaacatgtagcttttaactttgtactttcttatgatctcatctgatggtttcttgtagctgcctattgtggcctgattttcattctgtccaggagtgctctctagaagggtggcactcctggcctcttggtggcccatcccttgcaggcaggcttcatgcttgatagtgaccccctccctcctggtttttgttttctgcctctgtggcctgagcagtcgacctgatggggtctaaaaaacctttcttggccaggagcagtggctgatgcctgtaagaagttgcagcgagccaagatcgcaccattgcactccagcctgggcaacaagagcaaaactccatcatacacacacacacacacacacacacacacg

SEQ ID NO: 49 - DNA, 1676 bp, Homo sapiens
gtccaagctacgccactcgggctggggcgttgggagcgggagtgcagagcgtggtcgtggcggcggcggtgagaagagcgaggcggaggagggggtgccatggccgggcagcagttccagtacgatgacagtgggaacaccttcttctacttcctcacctccttcgtggggctcatcgtgatcccggcgacatactacctctggccccgagatcagaatgccgagcaaattcgattaaagaatatcagaaaagtatatggaaggtgtatgtggtatcgtttacggttattaaaaccccagccaaatattattcctacagtaaagaaaatagttctgcttgcaggatgggcattgttcttattccttgcatataaagtttccaaaacagaccgagaataccaagaatacaatccttatgaagtattaaatttggatcctggagccacagtagcagaaattaaaaaacaatatcgtttgctgtcacttaaatatcatccagataaaggaggtgatgaggttatgttcatgaggatagcaaaagcttatgctgctttaacggatgaagagtcccggaaaaattgggaagaatttggaaatccagatgggcctcaagccacaagctttggaattgccctgccagcttggatagttgaccagaaaaattcaattctggttttacttgtatatggattggcatttatggttatccttccagttgttgtgggctcttggtggtatcgctcaatacgctatagtggagaccagattctaatacgcacaacacagatttatacatactttgtttataaaacccgaaatatggatatgaaacgtcttatcatggttttggctggagcttctgaatttgatcctcagtataataaagatgccacaagcagaccaacggataatattctaataccacagctaatcagagaaattggcagcattaatttaaagaagaatgagcctccacttacctgcccatatagcctgaaggccagagttcttttactgtctcatcttgctagaatgaaaattcctgagacccttgaagaagatcagcaattcatgctaaaaaagtgtcctgccctacttcaagaaatggttaatgtaatctgccaactaatagtaatggcccggaaccgtgaagaaagggagtttcgtgctccaactttggcatccctagaaaactgcatgaagctttctcagatggccgttcagggacttcagcaatttaagtctccccttctgcagctccctcatattgaagaggacaatcttagacgggtttctaatcataagaagtataaaattaaaactatccaggatttggtgagtttaaaagaatcagatcgtcacactctactgcacttccttgaagatgaaaaatatgaagaggttatggctgtccttgggagttttccatatgtgaccatggatataaaatcacaggtgttagatgatgaagatagcaacaacatcacagtaggatccttagttacagtgttggttaagttgacaaggcaaacaatggctgaagtatttgaaaaggagcagtccatctgtgctgcagaggaacagccagcagaagatgggcagggtgaaactaacaagaacaggacaaaaggaggatggcaacagaagagtaaaggacccaagaaaactgctaaatc

SEQ ID NO: 50 - DNA, 565 bp, Homo sapiens
agaataccaagactgtgtgtacacgcagatgtcagtggcagagaatgaagatcagcttcgtgcaaagggttatgacaaaacaccagacttcattttacaagtaccagttgctgtagaagggcacataattcactggattgaaagcaaagcctcatttggtgatgaatgtagccaccacgcctacctgcatgaccagttctggagctactggaatagtctctacttctacagagttaaaggagataaagaatgcctctgggaagcatttggaccataaatataaccccaaattatataaggctaccagaaaatacatttccttatgaaatcaacacacaaaaagtcttctaatcctatttcgctaatcaaaagagatgggatctcacaatgttcctcaggctggtgtggaactcctgggctcagcgattcttctgcctcagccacccaaagtgctggaattacaggagcgaggaaacattttctaccaggaatctttatgaaatgtgtttgtaaataacaaaaaacattttcaaattgttggaaatttctcagcagttagtgcatt

SEQ ID NO: 51 - DNA, 2414 bp, Homo sapiens
caacaaccatctacagctgtattcttgttcccttgatggcacaattaaactgtgggactatatagatggcatcttaataaagactttcatagttggatgtaaacttcatgccctctttactcttgcccaagctgaggattctgtctttgttatagtgaataaagaaaaaccagatatatttcagctggtttcagtgaaactgccaaaatcctcaagccaggaagtagaagccaaggagctgtcctttgttttggattacataaaccagtcacccaagtgcattgcctttggaaacgagggagtatatgttgctgcagtacgggaattttacttgtctgtttattttttcaaaaagaaaacaacatcaaggtttactttatcatcatcaagaaataagaagcatgctaaaaacaattttacgtgtgtagcatgtcacccaacggaagactgcatcgcatctggtcacatggatggcaaaattcgtctttggaggaatttttatgatgataagaaatatacgtacacatgtttacattggcaccatgatatggttatggatttggctttttcagtgacaggcaccagtctgctgagtggcggtcgtgaatctgtacttgtagagtggcgcgatgcaacagagaagaataaggagtttctcccgcgtttaggagctactattgaacatatctcagtctcgcctgcaggagatttattctgcacttctcactctgataataagataataattattcaccgaaaccttgaagcatccgcagtaattcaaggcctagtgaaagataggagtatcttcactggtttgatgattgatccaagaactaaagctttggttttgaatggaaaacctggccacctgcagttttattctctccagagtgataaacagttatacaatttagatattatacagcaagaatatattaatgattatggtctgatccaaattgaactaacaaaggctgcatttggctgctttggtaactggcttgcaacagtggaacagcggcaagaaaaggaaactgagcttgaattgcaaatgaaactgtggatgtataataagaaaacacaagggtttattcttaacactaaaattaacatgccacacgaagactgcattacagctctctgtttctgtaatgcagaaaaatctgaacagcccaccttggttacagctagcaaagatggttacttcaaagtatggatattaacagatgactctgacatatacaaaaaagctgttggctggacctgtgactttgttggtagttatcacaagtatcaagcaactaactgttgtttctccgaagatggttctttactagcagttagttttgaggaaatagtcacaatatgggattctgtaacatgggaacttaaatgtacattttgccaacgagctgggaaaataaggcacctttgctttgggagattgacgtgttcaaagtatctacttggtgctactgaaaatggcattctttgctgttggaatctgctgagctgtgcattggagtggaatgcaaaattaaatgttagagttatggaacccgatcctaattcagagaatattgctgcaatctctcagtcttcagtgggttcagacttgtttgtatttaaacctagtgagccaaggccattgtatattcaaaagggtatctccagagagaaagtccagtggggagtgtttgttccacgagatgtccctgaatccttcacctcagaagcttaccagtggctaaatagatcccagttttacttcctaacaaaatcacagagtttattgacattcagtacaaagtctccagaagaaaaactcacaccaacaagcaaacagctgctagcagaagaaagtcttcccacaaccccattttatttcatattgggaaaacacaggcaacagcaggatgaaaaactaaacgaaactttagagaatgagctggtacaactacccttaacagaaaacatacccgcaattagtgagcttcttcacactccagcccatgtcctgccatctgctgctttcctgtgctccatgtttgtaaattcattgctgctgtctaaagagactaagagtgctaaggaaattcctgaagatgtagatatggaagaagaaaaagaaagtgaagattcagatgaagaaaatgattttaccgaaaaagtccaggatacaagtaacacaggtttaggagaagacattatacatcagttgtcaaaatctgaagaaaaagaactgagaaaatttaggaaaatagactacagctggatagctgccctttaagccttggagatggggaggatccttggactttgtgtttttgattgtatgttgatattctaaaaacatctattttaatgttatttctgttctaaaaataagataataaatattaacaaacttt

SEQ ID NO: 52 - DNA, 1241 bp, Homo sapiens
cagagtccagcggagttgtgggggccgggggcgccatgggagccactggcgacgccgagcagccgcggggacctagcggggccgagaggggcggcttggagctgggggatgcgggcgcagcggggcagctggttcttacgaacccttggaacataatgataaagcaccggcaggtgcagcggaggggccgccgctcacagatgacaacaagtttcacagatcctgccatctccatggatctcctccgagctgtcctgcagcccagcatcaacgaggagatccagactgtcttcaacaagtacatgaagttcttccagaaggcagcactgaacgtgcgaaacaatgttggggaggaggtggacgcagagcagctgatccaggaagcctgtcggagctgcctggagcaagctaaactgctcttttcagatggagaaaaagtaatacccagattgacccatgagcttccaggaataaagcgtggccgtcaggcagaagaagaatgtgcccatcgaggaagcccccttcctaaaaagaggaaaggacggcctcctggacacatcctgtcaagcgaccgggcagccgccggcatggtatggaaaccaaaatcctgtgaaccaattcgccgggaaggccccaagtgggacccagctcgcctgaatgaatctaccacctttgtgttgggatctcgagccaacaaagccctggggatggggggcaccagaggaagaatctacatcaagcacccacacctctttaagtatgcagctgacccccaggataagcactggctggctgagcagcatcacatgcgggcaacagggggcaagatggcctacctcctcatcgaggaggacatccgggaccttgcggccagtgatgattacagaggatgcctggatctgaagctagaggaattgaaatcctttgtcctaccctcctggatggtggagaagatgagaaagtatatggagacactacggacagagaatgagcatcgtgctgttgaagcacctccacagacctgaggccgggtcccctggccacacttggcagccctcctccaaagccctcttcctcacgtggctgaggccaccgctgggactgctcctagatggatctcagcggcattaagctgtgcctgagcgagtttgtagtgactcactgcacagcacccccagactagcatgtggttctatatttgtaaagttattgggataagaaacaattaaacagtttgtagt

SEQ ID NO: 53 - DNA, 1109 bp, Homo sapiens
aatcggggcggcgccgaaggggagcctctgggtgaggacccaactggggctcccgccgctgctgctgctgaccatggccttggccggaggttcggggaccgcttcggctgaagcatttgactcggtcttgggtgatacggcgtcttgccaccgggcctgtcagttgacctaccccttgcacacctaccctaaggaagaggagttgtacgcatgtcagagaggttgcaggctgttttcaatttgtcagtttgtggatgatggaattgacttaaatcgaactaaattggaatgtgaatctgcatgtacagaagcatattcccaatctgatgagcaatatgcttgccatcttggttgccagaatcagctgccattcgctgaactgagacaagaacaacttatgtccctgatgccaaaaatgcacctactctttcctctaactctggtgaggtcattctggagtgacatgatggactccgcacagagcttcataacctcttcatggactttttatcttcaagccgatgacggaaaaatagttatattccagtctaagccagaaatccagtacgcaccacatttggagcaggagcctacaaatttgagagaatcatctctaagcaaaatgtcctatctgcaaatgagaaattcacaagcgcacaggaattttcttgaagatggagaaagtgatggctttttaagatgcctctctcttaactctgggtggattttaactacaactcttgtcctctcggtgatggtattgctttggatttgttgtgcaactgttgctacagctgtggagcagtatgttccctctgagaagctgagtatctatggtgacttggagtttatgaatgaacaaaagctaaacagatatccagcttcttctcttgtggttgttagatctaaaactgaagatcatgaagaagcagggcctctacctacaaaagtgaatcttgctcattctgaaatttaagcatttttcttttaaaagacaagtgtaatagacatctaaaattccactcctcatagagcttttaaaatggtttcattggatataggccttaagaaatcactataaaatgcaaataaagttactcaaatctgtg

SEQ ID NO: 54 - DNA, 1408 bp, Homo sapiens
caaagatgtcatcatatccccccacaactgtggcaagcagccagccaaatttgggacgatctgctatgtaagttgccgccaagggttcattttatctggagtcaaagaaatgctgagatgtaccacttctggaaaatggaatgtcggagttcaggcagctgtgtgtaaagacgtggaggctcctcaaatcaactgtcctaaggacatagaggctaagactctggaacagcaagattctgccaatgttacctggcagattccaacagctaaagacaactctggtgaaaaggtgtcagtccacgttcatccagctttcaccccaccttaccttttcccaattggagatgttgctatcgtatacacggcaactgacctatccggcaaccaggccagctgcattttccatatcaaggttattgatgcagaaccacctgtcatagactggtgcagatctccacctcccgtccaggtctcggagaaggtacatgccgcaagctgggatgagcctcagttctcagacaactcagggctgaattggtcattaccagaagtcatacacaaggagaccttttccctcaaggggagactatagtacagtatacagccactgacccctcaggcaataacaggacatgtgatatccatattgtcataaaaggttctccctgtgaaattccattcacacctgtaaatggggattttatatgcactccagataatactggagtcaactgtacattaacttgcttggagggctatgatttcacagaagggtctactgacaagtattattgtgcttatgaagatggcgtctggaaaccaacatataccactgaatggccagactgtgccaaaaaacgttttgcaaaccacgggttcaagtcctttgagatgttctacaaagcagctcgttgtgatgacacagatctgatgaagaagttttctgaagcatttgagacgaccctgggaaaaatggtcccatcattttgtagtgatgcagaggacattgactgcagactggaggagaacctgaccaaaaaatattgcctagaatataattatgactatgaaaatggctttgcaattggtaattaaattctgtggcatcggtagttggcaagactaatctgcaaaataagaataattccagaaaagtgaggcaaactagaaacattaacttctattaatttattcatcaagtattttaggatggctaaataatttgataatgtgctgaaagatcattaaggttatatcaaattttagtaacaaataaattatttaaaattatttgccaggattcttaaaaatgacaaaaactaagaaaactaagtcacatatgctggtaaaattcaaatgttgatgtatcctaaaagagaatagtaataaagtcctaacagcaactttt

SEQ ID NO: 55 - DNA, 2064 bp, Homo sapiens
gctttttttttttttttttttttttttttttttttttttttttttttttttttttttttgctgttaggactttattactattctcttttaggatacatcaacatttgaattttaccagcatatgtgacttagttttcttagtttttgtcatttttaagaatcctggcaaataattttaaataatttatttgttactaaaatttgatataaccttaatgatctttcagcacattatcaaattatttagccatcctaaaatacttgatgaataaattaatagaagttaatgtttctagtttgcctcacttttctggaattattcttattttgcagattagtcttgccaactaccgatgccacagaatttaattaccaattgcaaagccattttcatagtcataattatattctaggcaatattttttggtcaggttctcctccagtctgcagtcaatgtcctctgcatcactacaaaatgatgggaccatttttcccagggtcgtctcaaatgcttcagaaaacttcttcatcagatctgtgtcatcacaacgagctgctttgtagaacatctcaaaggacttgaacccgtggtttgcaaaacgttttttggcacagtctggccattcagtggtatatgttggtttccagacgccatcttcataagcacaataatacttgtcagtagacccttctgtgaaatcatagccctccaagcaagttaatgtacagttgactccagtattatctggagtgcatataaaatccccatttacaggtgtgaatggaatttcacagggagaaccttttatgacaatatggatatcacatgtcctgttattgcctgaggggtcagtggctgtatactgtactatagtctccccttgagggaaaaggtctccttgtgtatgacttctggtaatgaccaattcagcccctgagttgtctgagaactgaggctcatcccagcttgcggcatgtaccttctccgagacctggacgggaggtggagatctgcaccagtctatgacaggtggttctgcatcaataaccttgatatggaaaatgcagctggcctggttgccggataggtcagttgccgtgtatacgatagcaacatctccaattgggaaaaggtaaggtggggtgaaagctggatgaacgtggactgacaccttttcaccagagttgtctttagctgttggaatctgccaggtaacattggcagaatcttgctgttccagagtcttagcctctatgtccttaggacagttgatttgaggagcctccacgtctttacacacagctgcctgaactccgacattccattttccagaagtggtacatctcagcatttctttgactccagataaaatgaacccttggcggcaacttacatagcagatcgtcccaaatttggctggctgcttgccacagttgtggggggatatgatgacatctttgggcatctgaaaggtggaacagtggcgctccacacaccggggttctggcccatcccactggctgtttccttgacaagtaagcttatcactgccttctagtctgtacccttcatcacaggcaaccaaacatgttgtcttatataacatttcccttgtagaacagctgatgtggccatgtttcggctggcggagatgaggacatgttcttactctgcagtagctctctgaaccggaccacaaaccattgggtagacataagatgatgctgcttcccacaagatcaaatccagggtgacatcggaccccacaggctgcattgaagtggttgttgcaagtgttttggataaagtaaccattttcaggaggcttcagggcagggcagtggacaagttcacaggtctggccagatgccctgtatccctctctgcagacacagtcttcaggggatgtgcttccaggtggagaggtgtgattttcatcaggacatggaatgcaactgctgattcctcctggtgagccttcaggtttgtatgtccccgatgggcaagctgtgcattcatactgcagacctttcccgtaatactcccgattgaattctagacct

SEQ ID NO: 56 - DNA, 1919 bp, Homo sapiens
ggcggctgcggagccggcggtccttgcgctccccaacagcggcgccgggggcgcgggggcgccgtcgggcacagtcccggtgctcttctgtttctcagtcttcgcgcgaccctcgtcggtgccacacggggcgggctacgagctgctcatccagaagttcctcagcctgtacggcgaccagatcgacatgcaccgcaaattcgtggtgcagctgttcgccgaggagtggggccagtacgtggacttgcccaagggcttcgcggtgagcgagcgctgcaaggtgcgcctcgtgccgctgcagatccagctcactaccctgggaaatcttacaccttcaagcactgtgtttttctgctgtgatatgcaggaaaggttcagaccagccatcaagtattttggggatattattagcgtgggacagagattgttgcaaggggcccggattttaggaattcctgttattgtaacagaacaataccctaaaggtcttgggagcacggttcaagaaattgatttaacaggtgtaaaactggtacttccaaagaccaagttttcaatggtattaccagaagtagaagcggcattagcagagattcccggagtcaggagtgttgtattatttggagtagaaactcatgtgtgcatccaacaaactgccctggagctagttggccgaggagtcgaggttcacattgttgctgatgccacctcatcaagaagcatgatggacaggatgtttgccctcgagcgtctcgctcgaaccgggatcatagtgaccacgagtgaggctgttctgcttcagctggtagctgataaggaccatccaaaattcaaggaaattcagaatctaattaaggcgagtgctccagagtcgggtctgctttccaaagtataggacatttgaagaactggtatgctactcactggtgaaggacagtcaggtgaaggactgtaagcccacacaagctcttcttatctctactagaattaaaatgttaagtcaaaaacggctccttttttgcgcctcctagtgaaacttaaccagctagaccatttgagtaccagcatttagttacaaacgtcaaaggcttccggtgctgcttaccttccttttttgttaatgtgcttttatttattaaaaaaaattacaatgaagatgcctgttttgtctctactgtgtactctgatcgtatctttccaaagtgcagactcttgtgaagttttcttaaattgttcactttaaagaaaatgacgtaccaacaatgatttggcttttatattactgtaagatgttataatgttaatgtggatgtagtgcttttactttacagattgattggaataagattattgcatatgaatttacccacaggactctgaatcatgttacccactcccctcacaatgttgtccacttagtgagttgcattgatctatccgtaccaaatgatgttgaataattacatatctttcttgactatactgatttcttattttggtcactattactaaatctctgttaatattctctcttttaactgaaaagggatgggatagaagggtttgcaatgccatattattggtggagggctgttttaacatctttgaagtatggcttgctgaatatctttaccaacatcttgaatatatattctagtgtccacaagatttagcaaaaagataaagcttgggtggaatatcattttaaaatgttcatgttctgttctatattttcttcacctactctccaaatattgtaatgcaaaaagtctcagtaatgatttggtagtattaattttgtggtcattgtttctcttcgataaatttattttcattaaatacttattagagggttttgaaatgtttttcaaatatgtgaaatgtgaaactgctgtcttttatattaaagtaattaaagg

SEQ ID NO: 57 - DNA, 1919 bp, Homo sapiens; identical to SEQ ID NO: 56

SEQ ID NO: 58 - DNA, 2837 bp, Homo sapiens
agcacgcggtcctgcccgtggacggggcaacgctggcagaggtgatgcgccagcggggcatcaacatgcgctacctgggcaaggtgctggagctggtgctgcggagcccggcccgccaccagctggaccacgtctttaaaatcggcattggagaactcatcacccgctcggccaagcacatcttcaagacgtacttacagggagtcgagctctccggcctctcagccgccatcagccacttcctgaactgcttcctgagctcctacccaaaccccgtggcccacctgcccgccgacgagctggtctccaagaagcggaataagaggaggaaaaaccggcccccgggggctgcagataacacagcctgggctgtcatgaccccccaggagctctggaagaacatctgccaggaggccaagaactactttgacttcgacctcgagtgtgagaccgtggaccaggctgtggagacctacggcctgcagaagataacgctcctgcgggagatctcgctgaaaacagggatccaggtcctgctgaaggagtacagcttcgacagtcgccacaagcccgcgttcaccgaggaggacgtgctcaacatcttccccgtggtcaagcacgtcaaccccaaggcctcggatgccttccatttcttccagagcgggcaggccaaagtgcagcagggcttcctgaaggagggctgtgagctcatcaatgaggccctgaacctgtttaacaacgtctacggagccatgcacgtggagacctgcgcctgcctgcgcctcctcgcccgcctccactacatcatgggcgactacgcagaggccctgagtaaccagcagaaggcggtgctgatgagcgagcgggtgatgggcaccgagcaccccaacaccatccaggaatacatgcacctggccctgtactgcttcgccagcagccagctgtccaccgccctgagcctgctgtaccgcgcccgctacctcatgctgctggtgttcggggaagaccaccccgagatggcgctgctggacaacaacatcgggctggtgctgcacggggtgatggagtacgacctgtcgctgcgcttcctggagaacgcgctggccgtcagcaccaagtaccacgggcccaaggccctcaaggtggccctcagccaccaccttgtcgcccgagtctacgagagcaaagctgagttccggtcggccctgcagcacgagaaggagggttacaccatctacaagacgcagctgggcgaggaccatgagaagaccaaggaaagctccgagtacctcaagtgcctgacccagcaggccgtggccctgcagcgcaccatgaacgagatctaccgcaacggctccagcgccaacatcccgcccctcaagttcacggcccccagcatggccagcgtcttggagcagctgaacgtcattaacggcatcctcttcattcctctcagccaaaaagacctggagaatctgaaagccgaggtggcgcggcggcaccagctccaggaggccagcagaaacagggatagagccgaggagcccatggctaccgagcccgcgccagcgggggccccaggagacctgggctcccagcccccggctgccaaggacccttctccgagcgtgcagggatagagagggagccagacggacagccagccagcggccccgtcaccagggagcccgactgcgggagaagggggcgagcctgcgggcggaagaggaagcaaggccctcttcctccacgtctcaccccaccccacccccgtgtcctcctgggagcctggcctgcctgccccgcagaaggtgtttttgcgctggttcaatgaatagatgatgcagaggccccattggagacacgtgaatggcgtgtgcggccatcagttcccggctggggggcaggtgttgcttcggcccccgccctccggccggcgtgtgcgagtgcgcccctggctgtgagtgttgaccgttcctctcccctgtacatagcccgagccagtcctgagtgggtgactcctgagtgggtgacgcgcagacgggatttctcaggtcatttgtatggtcgacatgatggctgctgctttggctgccaccacccccgggcccagcctgtctgaaagttcagggtttaggccgaaaaacccggtggggaggggtggggagccggagctctgtggcggggctggagggctggggtgcactttagtttggggcgggacgggagccgccgttgtgactggcgtggtctggctgctgctcccgaacggaggggtcggggttggcttgctgggccctcagagcccagtgggtggctctgactcggctccctactccctgcacccagctgggcgcagccttggggcctgcggtctgaatgtatccctcccctcagttttaacctgagctgccgaacgcacagtgggccgggggcgaggctgggggaagcggggcccaattacggatcccgggagttacaggtgccgacgtgatgtcgcttctctggtgcccagctcccttcctggtctgagactagctctgggggtggcgggggcccccacacgctgctcccgctccaccctgcccgtgctgctgctctgtgcctgctgtcagagccctggtgggggaggatgtggccaccctgagacccggaggagacgggcgtctgcctgggtttgcggagagccgcttatgggtgtggtccgtccagacaccttgtttcaagggggatgggcgtgagcgggcaagcagagcatccccaccgctgagcaagaactttttcttgtttttaaaccatcacgtcctcatttcacattggaataaagtgagtttttg

SEQ ID NO: 59 - DNA, 2482 bp, Homo sapiens
ccgcttttttttttttttttttttttttttttttttttttttttttttttttttttttttttttttaagttaattctttaaatttaatcagtcatttataaaactccccaattagtaaaagttggcttattttaacagccttaaacattggccactatttaaacaagacattctaaaaaaaaaagcaatcacataatagtttatagtcatttacaagtggatggtatacatttagatacagaggtagaagttcacctttacaatgtttcactaatacacatataccaaattcaaggcacaaaatagtttgctttacaaaaaaatactgtaaaaatgtcatttgctgttctacaatgtgaataaacctttcaaaagaatctttacacccttccatacatatgccatagaataagatttcttcctctcactaatcatagttggcacaaaaatggggacttttcaatgtagaagttcccatttttaaaaactgttcctttgcagagctgctatgtattctagataagagtccatccaaagaaatgaaacacagcaacttcctgaggaaagggcactttctgtatgcagcaaaattcataggtagaaaatgtatgatcttttaggataattaggtctccagacacttaatgaagtatatcagagataaaattaaaaattcaaggctgggtgcagtggctcatgcctgtaatcccagcactttgggaggccgaggcaggtggatcacaatgtcaagagatggagaccatcctgaccaacatggtgaaaccccgtctctactaaaaatacaaaaattagctgggcgtggtggcgcatgcctgtagtcccagctacttgggaggctgagacagcagaatcacttgaaactgggaggcagagattgcagtgagccgtgattgtgctactgcactccagcctggtgacagagcgagactccatcaaaaaaaaaaaaaaaaaaaattcaactaatactttagtcattgtgactttaagaaagagacttggtcacctttactgtaacactcagacatcatttacttcagttgatggagatttcaaaattccttttcaaaagagctaaacatacaaacaccatgaaaaagtcacctaggccttgcaaaacggaaacttagaaaacgtgagaaaatacagcactatcagtccttgaaattgcgaagatgtcaactggctagagtttaataacaagaatgagtaaactctgggaattctgaaaaatcacacacatgaaacatacagtctagttatcatttctagacttcctgctcattaaaaaataatggtaacctgaagatgtcacactgcttctctacagatttgactggtttctgggttctgcctaaaaggaccctgttggcaacaacctaagttcacttgtactgatcacattttccaagtactctagtcggttaatttacactttatttttttaaaaagttgatttaaaaaagaaacaacacaagtttagaatccataaaatgtcagcaatgctgatgtgcactggactgaaacatcttgatcatcttctgatagaagtaatattccatacaaaaagattcttagattccattttttgcttcattattgtttgtggcttgctttctttgagcaataaaggggtacatacacttgtccgctcctaggaaccgatacatgcacacaactgcttcaaatggtaggatgctcttcatgaaggtcacgatgtacatgaggcggggagtgcagatcatgggctggtcagtgaggatggccttcatggcctgcttcacacagtaatcaggcttcagaggtggcagaaaaggctcaatttctttcctgattcggcagcctctgaacatgccagtgtctacaagataagggcaaaccaaggttgttttaattccatccttttcagcagcctttagttcatggctcagggattcatgaaaacccacaactccaaatttactggcacagtaatcctcaactccggcagtactgaacaatcccaaggaacttgcaactgtcacaatatgaccatgattaatctccagcatcgtaggaagaaaagccttagtggtccagaagtgtgcatggcaattgaccatcatggttctctcaatgagctcatcaggacattccagaaggtgatgcccagagaccacaccagcattattgaccaggactgagacttcgccaacctccttgcggactctttcagccgtcaggtagacgttctccctcttccccacgtcacaggtgtaggtaaaaacctgcaagttacagtggggcagaatttcttcctcaccattcccagcttgcagcgcagcggcgtcggccgcctccaggtcgcggtagatgtggcgcaccatgccagccgtctcctcgttgctttgcgtgttgatgtcccacagcaccagcagcgcccgacgccgggcgaactccagcgcgaagaggcggcccaggccgc

SEQ ID NO: 60 - DNA, 1815 bp, Homo sapiens
gtggagggagagtgaattctgggaatctctcagcagctttttgccaaacagatgggccaggagccgcggaaccaggctgaggaatgttgcctcacgatctcacatatccattcctggcacccaccagcccagggaatgcctctaccagttgtcagcgagaggcttacacagcatcttaaataaaagggattattgaaccaagaggccagggactgatggaaatgcccaccttgctggctcattgaaaaagtttggcaaggttgtcaggagacatgaattagatgggcttgggtcttgtgccctttgctaaaccaagtgctgtattgggaaagagacggggagagaagtgttggagatgctctttagtcaggcctgagtcacttgcccaaccctggagttggagttggggatggagccaggatctccaaaccacatgcccctagagtttcagggaaaatatggattgtgaattgaagatggggggtgatgtaaggcagacaaggacagaaaatccctcttccagctgtgatttggctgtgagtttggcgctcgagacaccatacgctcctgaggtttgttaaggggtttcaggatattgtggacaaaagggaatagcaaacgatgttcagtccataagtaccatttggaggaggaaataattgaaattgctgctgatcaaaaagctttttgtctccagtttggatgttggagacaggtttctgtgtaagagagtgagggtgtacaacatgactgagaaagaaaacaatgagttaaggcacataagtgcgcatgggtgtcacctggaggccttcttataacacagatggtcaggcccaccccaagtttctcatgcagtagaggtggagctcaagaatttgcatttctattttactttatttatttgctttatttatgtttgagacagggccttgctctgttgcatgggctgtagtacagtggtgcaatcatagctcactgcagcctccaactcctgggctcaagtgatcctcccaactcagcctccctcccaagtagtgaggactacaatcacacgccaccatgcctggctgtataatttgcacttctaaggtgttcccaggtgatgctgatgttgctggcccagggaccacacattcagtactgctgttaaggcaaaagacttaaacactccatatatgaaagaaagaaaaagagagagagagagagagagagagagaggaaggaaggaaggcaggcaagcaggcaatgcttcaataaatccattaaaacacattcaaacttcagaaataaacgtgttcaaataagaccagcagtccttggtggtggcttatcatttcacccatttgacagttttaaaagattgaccgaactcagtattgattaaggtttaggggaaaggctgtctcatatactgtgtttacaaatgtgaatgagtacagcctttccagagggcagtttggctatgtgtatcaaaatataaaatgtgtttgttttgacactacaatctcacttctagaattttactctaagaaaagataagtgtgtgaaaagaaatttaagtgtgtgaaaagatgcatatgcatgggattgctcatcacggtttcatttataatgaggaacagcaaacccgttaaatatccctccatggggagcaagtcaggcaaattctgtacagacacacaaaggcatgttatgcagtgaagagaaggaggcacatgtgggttctgcagagaggcagatcccaatgaggggtcaggacgggtcttggctgcacatcctggtttcctcttcatccatggggagcagcaccttatg

SEQ ID NO: 61 - DNA, 1707 bp, Homo sapiens
cttttttttttttttttgattgttttggatctctggtttaattagcactctatggttgggaatgttattggtttctttagttggtgcattttcagatgtaatcttgtccactcttttcacaggttctgtctgtactagggcagcatctaacatggctttcatccacaactccatttcctttcctgtatcagtgcagaaataataggtccgcatgtttggatgggctgccttaaaagcatatttgcgattaatgtgatcttcagaggtaagcaaagctatctgaaaactaggtaacagtatgcttcccaggataccctcttctttctcatctctataataaaagaggcaaaggtcagaaagcacaaaccagcgtttcttccacaatttcatgccagtactgtcctgtttataaagccaacctcgtctgacaaccggtgcattaggattccttttaattgaatttgacctctttccaaaattatgaactttttttgaagctcgtgaagttctgcctacagggctcattggatgcactgcataatctgaagtcacgttatagttagaagcttcatttatcatacttattggccgttccttcttttcttcagatgtcatggttgcaacagtctgttcattcactacaaaaatacaattgtcctgtgatggttgtcctgtgactggatgtttgcaggtcactttcctttcattatggtttatatagtatcttgcaccttcaaaagtatatgcttcttcccagccagtaggcaaatctgtgctctgccgccggtgtccggtgaccaccgcctcgccggcgcagaccccaaaatgcttcagatggtactccagggatctgtaggcaccacagtgaatcaggggcctttggaagttgcccaggtttttctgtctgaaatacctagtgacccaaagctcttcagacatcataataaactgcgactctgctttaaagattttactaaaaggtgtgaagatgccttaagaaaaaataagagcttaattgggccggatcaaaaggagtatcaaagggaactggagagaaactatcatcgccttaaagaggccctacagccactgatcaacagaaagatccctcagttatacaaggcagtattgcctgtcacctgccacagagattccttcagtcgaatgagccttcgcaaaatggatctctaaactgaatgcacttgttttattcatctgcaaagagccatgtattcaacatcgagtgtgaaaagatctattggaaaacaacatggaatggaattctggaaattattattcattgaagaatgcagtggccaagaaaatatcaaatgtagattgttaacgcttgagaatcatggctatggtttctaatgttctggtaacaagctgttatcttttaagacattttaatgactcaaaggtacactatacatttaccattatttataccatagctaaggttaaaaatttattcactttaagttcgtattttttaatttatattaccatttatagattcattttggaaccattttaaatgtagtaatgcttattttaaaggtactattaaatatgtgaatgtttacactaattttaccgagtgggacttcaaaatttttattattgacaatggcagagaacaattaaagggttgactcaagaactagttccaaacctagcagaataaaaatcatagatagcccc

SEQ ID NO: 62 - DNA, 1178 bp, Homo sapiens
cgcttttttttttttttttgtctgagtatttcaatttctttttgaagttcattgatttgaagagtcatttcttctgactttgaatttacaagagactgctgtaaatcttttagctttgaaatttccaaaattaattgattctgcttagttatcaaattgtccttttcaaactgcatggtttctatcttttgactcatttcattctgtaaaccatctatctgctgtttatagtgaatgcctaaattatctttaagtttttcaatatttattcgatgttcaatttctaaatcttccttcagtttggaaagctcttcttcgtgactaaatagaagctgtgttctcagcctctctaattcagcttcttgtgattcagccattctgtctaacacagcattcttttctttttctaacatttcaagttttatcttgtaatttgtaacttctgcttcatgttttaattctagttcctttctggattcagatgcagaaacaatctcagctttcaaatcttccactgtactaagggacttatgtgcttcattaagtttactttcttgttcagctattgtctgtctagctctctgaatctgttcccttgaaaagctcaattcttcaacaaggtcttcaagctgtctctgtagagcacacttttcttctaaaattagtcctagttcttccttgagtttttccttttgagagttagtatcttgcaattttatattcagttcatttattgccacattcattaactttatctgatcttcattaactgtaatatttgaatatgaccttaaagcattctccatttctcccttatgccgtgttttcatttcctccatctgtgccatgtgttgtcttattaattcttgtttcatttgcactatctgctgcccatacatctcatccagctctgcccggagttgttctaactttcttggtgtttcttgttccattcgttggactatatcagtttcgaactggctgtctttatgatttctcttctgaagttcttcgactgtccccattaactgttttatttcttcagaagactgtctttctttttgcttagaattagtcagctctaatttcatgttttttatttcttggttcttttgcacaatctgttcttgtaattctcctagtaatttatcagcagttgttaatttatcctcccgatt

SEQ ID NO: 63 - DNA, 2750 bp, Homo sapiens
cagtgagccctttgaaaaataaacatccagatgaagatgctgtggaagctgaggggcatgaggtaaaaagactcaggtttgacaaagaaggtgaagtcagagaaacagccagtcaaacgacttccagcgaaatttcttcagttatggtaggagaaacagaagcatcatcttcatctcaggataaagacaaagatagccgttgtacccggcagcactgtacagaagaggatgaagaagaggatgaagaggaagaagaagagtcttttatgacatcaagagaaatgatcccagaaagaaaaaatcaagaaaaagaatctgatgatgccttaactgtgaatgaagagacttctgaggaaaataatcaaatggaggaatctgatgtgtctcaagctgagaaagatttgctacattctgaaggtagtgaaaacgaaggccctgtaagtagtagttcttctgactgccgtgaaacagaagaattagtaggatccaattccagtaaaactggagagattctttcagaatcatccatggaaaatgatgacgaagccacagaagtcaccgatgaaccaatggaacaagactaactatttagaaacatttagatgcagtattttacatacagttctggttttaacactgtataaaacttttgtgtaataaaatggacctttagttttacaagagaagcaggttgtaaaataaagtactttatggataattcctgaaagagttgtacatgtaagaactgtgaatatcagctcctctgggtcctgcttaccttaccgctgacttttctttctttctttttttggtctgggcaaatcagtggtttgtgtatagattttttttttttttttaatttaggattgaagtttttaaactggaaggtaattacaattttgaaaagttttttgagattatcacatttagtttatacatatgcaagaagctttttgtcttgtctctttctgatagctctagcagttttcatattttggtcatagtttcaacattttaacatgtgaattatagggtttcatgctggtttccagattttattgtttggctacgtacaatggaactttaagtcatatatacatacatatatatatatatatatatatatatataattctaaggggggaaatgttatatttttctgtttctataagagatgaatacagtggatactttttctattggtaatgattgagttcacctctttcagaagacattttctttctcttctgagtaattgaaataaaatctggcccttgtgaaaccctggaaatcttaagtctgttgaaataccaggttaaacacattccaagagatctgttcaaactcaaattcttttgtatacttctgaggtgcctgagaaaaagacttcattatttatgagaaaatatgctttatcttggaaattgtgttcaaatgttagcttactattttgtagaatgaatgtttatgaagctgatatgagaccatctcagaagaaccaagcaggttccttgaccttttgcttgcttttctgaacattgtgaatattacacatgtctttctaaattattctagggtatgcaaatgtcaatggtatgaaacaccactgtactggaagaattaatatattactttagtatgtacctgagctaaatgactgaagctttaggggtgcatagaaaccaccataatttgtatgacattttgaagtgaattaaatatttttgaacatgcttcttcgacagccagtgttatatttttcagatcaacacaaagcacaatgattactcgaaattcagtattttcaaatttacatatttaaagtcatgcaagctgtaacttccctgtcaaaattactggctgccaaatttatacctgtttcttcagctgtaccttttgatatttaaagtttttaaatttctgtaaagtagattttgtagaatgtaatgtgttcactgcctttgtgaagcggtatataattgtataatttctgtgtgtaaactgaatgcttgggctttcaatacagtattcatataaagcaataaatattaatgttatgaaatatttgactacatttttatcaaaatatgaaagaatccccccttttttagtttcagatacctgaactacacagatgagcttctaaaactgatggaaacagtttctgacactgtataatatgcttttgggtgatttggggggcaaccacaagttttgcgttttgactacttaaatcatcatggctataaataccaaaacgatttggatccatttatgtttgtaggataatatactactgactgacttgactgtcaggttcacaacagctagatgatatatttatgactatgtctaatagttgaaataaaatctgaatattgatttactatacccaagaggggagaaaaattaaccattgtaaatttttaaaaattttttcaaaaatgttaaaatgaggcaaatttaagtttacaaattttgaaattttcttttgaatatttatgaaattgtcagtaaacttacctaagatcctgtgaccttttgatattttttattttaattgtagtgccatggaccatttgtaaacaaattgatttacttttgttggttgtaagttgaagatttagcattatgactttgaggtctgtggttttatttgtaaacttgcaattgctatatttgcaagggcaaatgtatttctttattaaataaagtacaataatggtgaatgtaccaaaatgacatcactt

SEQ ID NO: 64 - DNA, 5209 bp, Homo sapiens
  misc_feature 5176: n = a,c,g, or t
gaagagggggaaaaaggaagtttgtcctgtcctggatcagtttctttgtcatgtagccaagactggagaaacaatgattcagtggtcccaatttaaaggctattttattttcaaactggagaaagtgatggatgatttcagaacttcagctcctgagccaagaggtcctcccaaccctaatgtcgaatatattccctttgatgaaatgaaggaaagaatactgaaaattgtcactggatttaatggtatcccttttactattcagcgactatgtgaattgttaacagatccaaggagaaactatacaggaacagacaaatttctcagaggagtagaaaagaatgtgatggttgttagctgtgtttatccttcttcagagaaaaacaattccaatagtttaaatcgaatgaatggtgttatgtttcctggaaattcaccaagctatactgagaggtctaatataaatgggcctgggacacccaggccacttaatcgaccaaaggtttctttgtcagcccccatgacaacaaatgggttgcctgagagcacagacagcaaagaggcaaatttgcagcaaaatgaggagaaaaatcacagtgactcttcgacctctgaatcagaagtttcctcagtgagccctttgaaaaataaacatccagatgaagatgctgtggaagctgaggggcatgaggtaaaaagactcaggtttgacaaagaaggtgaagtcagagaaacagccagtcaaacgacttccagcgaaatttcttcagttatggtaggagaaacagaagcatcatcttcatctcaggataaagacaaagatagccgttgtacccggcagcactgtacagaagaggatgaagaagaggatgaagaggaagaagaagagtcttttatgacatcaagagaaatgatcccagaaagaaaaaatcaagaaaaagaatctgatgatgccttaactgtgaatgaagagacttctgaggaaaataatcaaatggaggaatctgatgtgtctcaagctgagaaagatttgctacattctgaaggtagtgaaaacgaaggccctgtaagtagtagttcttctgactgccgtgaaacagaagaattagtaggatccaattccagtaaaactggagagattctttcagaatcatccatggaaaatgatgacgaagccacagaagtcaccgatgaaccaatggaacaagactaactatttagaaacatttagatgcagtattttacatacagttctggttttaacactgtataaaacttttgtgtaataaaatggacctttagttttacaagagaagcaggttgtaaaataaagtactttatggataattcctgaaagagttgtacatgtaagaactgtgaatatcagctcctctgggtcctgcttaccttaccgctgacttttctttctttctttttttggtctgggcaaatcagtggtttgtgtatagattttttttttttttttaatttaggattgaagtttttaaactggaaggtaattacaattttgaaaagttttttgagattatcacatttagtttatacatatgcaagaagctttttgtcttgtctctttctgatagctctagcagttttcatattttggtcatagtttcaacattttaacatgtgaattatagggtttcatgctggtttccagattttattgtttggctacgtacaatggaactttaagtcatatatacatacatatatatatatatatatatatatatataattctaaggggggaaatgttatatttttctgtttctataagagatgaatacagtggatactttttctattggtaatgattgagttcacctctttcagaagacattttctttctcttctgagtaattgaaataaaatctggcccttgtgaaaccctggaaatcttaagtctgttgaaataccaggttaaacacattccaagagatctgttcaaactcaaattcttttgtatacttctgaggtgcctgagaaaaagacttcattatttatgagaaaatatgctttatcttggaaattgtgttcaaatgttagcttactattttgtagaatgaatgtttatgaagctgatatgagaccatctcagaagaaccaagcaggttccttgaccttttgcttgcttttctgaacattgtgaatattacacatgtctttctaaattattctagggtatgcaaatgtcaatggtatgaaacaccactgtactggaagaattaatatattactttagtatgtacctgagctaaatgactgaagctttaggggtgcatagaaaccaccataatttgtatgacattttgaagtgaattaaatatttttgaacatgcttcttcgacagccagtgttatatttttcagatcaacacaaagcacaatgattactcgaaattcagtattttcaaatttacatatttaaagtcatgcaagctgtaacttccctgtcaaaattactggctgccaaatttatacctgtttcttcagctgtaccttttgatatttaaagtttttaaatttctgtaaagtagattttgtagaatgtaatgtgttcactgcctttgtgaagcggtatataattgtataatttctgtgtgtaaactgaatgcttgggctttcaatacagtattcatataaagcaataaatattaatgttatgaaatatttgactacatttttatcaaaatatgaaagaatccccccttttttagtttcagatacctgaactacacagatgagcttctaaaactgatggaaacagtttctgacactgtataatatgcttttgggtgatttggggggcaaccacaagttttgcgttttgactacttaaatcatcatggctataaataccaaaacgatttggatccatttatgtttgtaggataatatactactgactgacttgactgtcaggttcacaacagctagatgatatatttatgactatgtctaatagttgaaataaaatctgaatattgatttactatacccaagaggggagaaaaattaaccattgtaaatttttaaaaattttttcaaaaatgttaaaatgaggcaaatttaagtttacaaattttgaaattttcttttgaatatttatgaaattgtcagtaaacttacctaagatcctgtgaccttttgatattttttattttaattgtagtgccatggaccatttgtaaacaaattgatttacttttgttggttgtaagttgaagatttagcattatgactttgaggtctgtggttttatttgtaaacttgcaattgctatatttgcaagggcaaatgtatttctttattaaataaagtacaataatggtgaatgtaccaaaatgacatcacttaactctatgagagatctgcattttaatctatagtttaatagttttaatatttattagatattcatatgttgatcatagatcaaacttgttgctgtttatacagataattgtagaatgctcatggaatatctttagggtaggtggaatacttctgtagttaaattgggaaaccttgttcagctggttttagatattgatggccatttggaagtaaatttccgcaggtattcataggtgcacttaacacagactttgcttaatgaaaatgtcagttctaatagtaactgattcacttctgaacagaagtgattttaggcatatttcttaacatatatcaagcaaagtcctgttaaaagatctaaatgaagaatggagacctcagtgattaaagatattttgtttctgaccttgagcagattgcttacctgttctctagactataacccaacatgtaaaaaaaatttgaagatggtgatgaggaaagtgagatatatatatatatatgtattatgtttctagcacttttcccttttaaaaagtgaaaatatccttgtacatttttgaaaaatatattttcagttctgaaaaatgtagcagaagtagtgaaaatgtcatattttaaatgttgattattagataaatttaacctgcttagggtttattgtaactacacctttcagacgtgtgttttggagtagtggaattgccagccaggccctgtggcttggaaaggcatcccagaaatcctcggccagaaggtgtggcttgttaaagcattgagattcagagtattttgttttgctggtgtagataggcatgtatttatgcatttttgcatttgtaaaatcaacttttcaaataatgtaaatgtaatatactagtttacttaaaggtacttgggcagaatctaaagctgctacaatgtttgattatgaaaaaaatgtaacatggtaaggatgaaaatgcaacttacaaaaccaaaggaattaaaaattttcggtagtgtttcaaattgtcttctgaacaggaatttaacattggttttgatgaagtgagggtcagttctcaagatttgtgctaatcataaaatgaatgaatgcaaaacaccttgtaatttcatatggaattataaaaattaggtttgctgggttttggcctaataagagtgctagtatgtattggttagaatacatcttactatttcacattttaaaaatcagtacactcttcaggattttcttttatttcaacttggagcctagattactttgccaaatgtattattttcataatgcaataaaatatgggagatgctgaggtcagggcacttatgtgcatcaagtgatggagacagagtaaagagaatttatggatatatatgcatatcttgctaataagtttggtttatcatcacatcaagataaattgcctttagcatagaacttgagataagtagacgttcactagcaagtgctaacatttgcatcaggctggggcagaggcatagctattgtctcgggcatccttcccagggttgggtcttacacaaatagaaggctcttgctctgagttatgtgacatgcctcagccccatggactaagcaggggtctggtataaaaacactcctggaaacgcctttgccctgatccaaatgttagcacttgctagtgaacgtctacttatctcaagttctatgctaaaggcaatttatcttgatgtgatgataaaccaaacttattagcaagatatgcatatatatccataaattctctttactctgtctccatcacttgatnacataagtgccctgacctcagcatctcccctct

SEQ ID NO: 65 - DNA, 1476 bp, Homo sapiens
cttgaagtacttttttaatccaattaagctgataataatcacttcgaattttaatacaatacaatcatgttcccaaatttcctaggctcataacaatacagtctcaatacaaaagacgtaataatctatttttattcattttaaatcaaagagaccattccatttcctaacaaacaggtaagttacaaaagtagtccattttacttttcatcagtctttccctgttttgaacaagtttttttgagaattcttagttttagtttttgtttagcttacacactgaaaattttgagaagcatctaaaaaaatccacaattagtgcaaaaagaggggacaatactttaagtcattccttctataaaaagaattaaggttactaaatgccaatttttaagcaaatatatagtttcctatttgccttctgaaagacagcagatataaaaatagttcaatattaggtttaacaaggtttgaacaacacatgtactatcagctttattttacctgcaaaaatattttagctacacttggaaaaaaataaacttgagaatataacttcacatttctaaggccagatgcaagaatacttattcttttccttttaaatagaagacatgccataaaatttatgaaagttaatttgtaggaatgaatacatttaaaaaatactggttaatctgtgaggaattccacatttgcctatttaacaaaatttcatccatttcataaggctttggtataagtgattcccagcacttcatcatttatctttcttctttgcctcctttacttccttcgtctgctcatccttctcccctctcacgttgacatttgctgctccttcttgattttccctctgagaattatcaactatctgatagtcctcaaggagagtgtgtcctgtttgtgttgcagttttcttcaccattgctttgataccaatgttgttaatattgtaggcagttacgccaacattgaccgcagaatccaccgcatggtgggtagcttctcctgcattatatccgtatttgtatctgacagtttgtacagtttctgctgaaacattgttaacgatgcatttagctgcacattccaatccttgccagacagttgaaaatccttgaacactacttgctgctacaaccatagcaccatccagaggagatttcccatctttgtcttttttaagagattctggaacaagtttgcttccatgcttcttgacatgtggagctagttcttttccaacgcaatttgctacagtgcaaactccatcaaccaggaactgactgacttttgctgctcctcctgtagcttgcttcgctatataaagtcccttggtgacagctggactaacttccacgggtttttcttctggttgaatccgctctcggagtttagaagcacctttctggattgccttaccagtaatctcagcacctttgactaaacccctcccgattgaattctagacct

SEQ ID NO: 66 - DNA, 1475 bp, Homo sapiens
  misc_feature 650, 1276: n = a,c,g, or t
aggtctagaattcaatcgggaggggtttagtcaaaggtgctgagattactggtaaggcaatccagaaaggtgcttctaaactccgagagcggattcaaccagaagaaaaacccgtggaagttagtccagctgtcaccaagggactttatatagcgaagcaagctacaggaggagcagcaaaagtcagtcagttcctggttgatggagtttgcactgtagcaaattgcgttggaaaagaactagctccacatgtcaagaagcatggaagcaaacttgttccagaatctcttaaaaaagacaaagatgggaaatctcctctggatggtgctatggttgtagcagcaagtagtgttcaaggattttcaactgtctggcaaggattggaatgtgcagctaaatgcatcgttaacaatgtttcagcagaaactgtacaaactgtcagatacaaatacggatataatgcaggagaagctacccaccatgcggtggattctgcggtcaatgttggcgtactgcctacaatattaacaacattggtatcaaagcaatggtgaagaaaactgcaacacaaacaggacacactctccttgaggactatcagatagttgataattctcagagggaaaatcaagaaggagcagcaaatgtcnacgtgagaggggagaaggatgagcagacgaaggaagtaaaggaggcaaagaagaaagataaatgatgaagtgctgggaatcacttataccaaagccttatgaaatggatgaaattttgttaaataggcaaatgtggaattcctcacagattaaccagtattttttaaatgtattcattcctacaaattaactttcataaattttatggcatgtcttctatttaaaaggaaaagaataagtattcttgcatctggccttagaaatgtgaagttatattctcaagtttatttttttccaagtgtagctaaaatatttttgcaggtaaaataaagctgatagtacatgtgttgttcaaaccttgttaaacctaatattgaactatttttatatctgctgtctttcagaaggcaaataggaaactatatatttgcttaaaaattggcatttagtaaccttaattctttttatagaaggaatgacttaaagtattgtcccctctttttgcactaattgtggatttttttagatgcttctcaaaattttcagtgtgtaagctaaacaaaaactaaaactaagaattctcaaaaaaacttgttcaaaacagggaaagactgatgaaaagtaanatggactacttttgtaacttacctgtttgttaggaaatggaatggtctctttgatttaaaatgaataaaaatagattattacgtcttttgtattgagactgtattgttatgagcctaggaaatttgggaacatgattgtattgtattaaaattcgaagtgattattatcagcttaattggattaaaaaagtacttcaag

SEQ ID NO: 67 - DNA, 261 bp, Homo sapiens
ggtcccctctctctgcccctcccactccttttctacggcgatttgtctgtgtctggcccccacccactgcccatcccccattgttgtctggatgtggttctattttttatcggtctcctttcccctcctccccgttctcgcccccgccccaccccctgctcccactaccctttgtctcttgctctttcttgggcttctgtacaactcaacttgtatacactgtgtacacacaaccagccaaacgaaaacccaacggcaaac

SEQ ID NO: 68 - DNA, 942 bp, Homo sapiens
ctttttttttttttttgagacagggtctcactctgccacccaggctggagtgcaggagcgtgatcttggctcattgtagcctcaacttcccaagctcagttgattctcccacttcagccccccaagtagctgggaccataggcatgtactgccacatccagctaattttttgcaattttttagtagagacaggttttccctatattgcctaggctggtctcgaattcctgggctcaagtaatccacctgcctcagcctcccaaagcactgggattacaggtgtgagccactgcacccagccttaaaaacaaaggataaccgagtataatgcgtgaggctaactggcccaagacaaaagctgcaacaaatgattcaatgtttgaatgtgttgatttaaaaaaggtcttgttatagtcaagaaaccttagctattttctggattctgctactatgactgtgtatgtgtacctgtgtgtctatttgtatgtgtgtgtgtctgtctgtggtgaaaaaaaggagagaccggattcagacaagtaatgtgccccatttgggcctaaagatcttccacctgtgatacaatgatgaaaaaagaatacctgacttataggtggcaataaggaataagaatcatccttgaagaatgtcaaggagccatagaaacaggaagaaggaaaggaggactgagcatgcccttgccgctggctcagctgcagatgatggggaggccactggaccacagcccgggctgaatacgtactcttggtcgtgcactgtgttcttatccaggcccatgctgccgggttgggagaagctggctgcaggctcctcagccctggcgcctggggcacaaaaggcccagagcaggccacacaggaagggggttctgagcagggatctcatggtcatcaatatccttacggtctccgaagcagaggccgc

SEQ ID NO: 69 - DNA, 1027 bp, Homo sapiens
gtgtgtgtggtgtgtggtgtatggtgtgtgtgttgtgtgtgtggtgtgtgtggtgtgttgcttgtgtggtgtgtgtggtgtgtggtgtgtgtggtgtgagagttgtgtggagtgtgtgtggtgtgtggtgtgtgtggtgtgtggtgtggtgtgtgtggtgtgtgatgtgtgtgtctgagagagagggagggccttgcccagctcttcagcctgagcatcggaagctgccgttgtttgtctgcttccctagctctttctctccttcactgacagagccccctcagggcccttcctggtgctgctcgctctgctccttttccattaccaggctgtcactggaatgcgttgctggagcaccgggtgcatccccgggaaccagatgtgtgacgcagattccagcaagggactctatttgggtggagaacatcgttgtcaataaaaatatcaacaggtggcctagactcagtgtcctggagaaggacggcgagggtcagcccagcagggcacctgcccagagtggccacagggttccaggacagtccttggggcaggacatggggtgaactgagtggttacatcagaccctgggaccttcacctgccagccactcgtcctgccaccacccactgcaagacgttgatcaaatcctaccagcctctctctcccaggacttcaagtcttcatgagtcacaggagctttttcactcaccttgtggggcaggtacccaaggcagcaccttggagggccagagggatggtcactggttcccagggcctcccccacgtctgccctctggaggtctggttgttttgctttttttttctttctgtatttaattttttctttttttcctttataaatgttaaaaattgtatattattatatatttgtggggttcagtaggatgttttgatacatgtatacattgtggaatggttgagtcaagctaatgagtctgtccatcccctcacacacttatctttttttgtggtgaaaacatttaaaacgactctttcaagaaatatg

SEQ ID NO: 70 - DNA, 668 bp, Homo sapiens
atttattcattcttgattaaatgcactgaaaagtaaagggtctgtttgtgtcatgttcatgaaaatgcggttagagaggtgctattcaagtgattctgaaggcaccccaaggtatatctgtaatttaaagattactgcaaatatctttactttactgtgggtttttagtacatctgttaatttagtgtttctttgtgtgttttgtagactagtgttcttccatccttcaactgagctcaaagtaggttttgttgtaacattgtgattaggatttaaactaattcagagaattgtatcttttactgtacatactgtattctttaagttttaatttgttgtcatactgtctgtgctgatggcttggcttaagattttgatgcataaatgaggtcactgttgatcagtgttgctagtagcttggcagctcttcataaaagcatattgggttggaaaggtgtttgcctatttttcaaattatttaatagatgtatggtaccatttaaaagtggttgtatctgaatttactgtggggataacatacactgtaatggggaaaaattacctaaaaccaatttcaaaatggctttctttgtatttcagtttaaaaacccagtgcatgtacgccctctgagatgcaataaacaccttgaacaaagaaatgcaaacat

SEQ ID NO: 71 - DNA, 957 bp, Homo sapiens
gaaaaactgattcacctggcagagacctaccccatccacatgcacagccagctggaccaccttagcctctattactgcaggtgtactctgccagagaatccaaacaatcacaccctccagtactggaaggaccacaacatcgtgacagcagaagtccactgggctaacctgactgtcagtgaatgccaggagatgcatggagagttcatgggatctgcgtgcggccatcatggaccctacactcctgatgtcctcttttggtcctgtattctctttttcaccaccttcatcctctcaagcaccttaaagacgtttaagacgagccgttatttcccaaccagaatggagtcttgctctgtcgcctggctggagtgcggtggtgtggtcttggctcactgcaacctccgcctcctcccgagtagctgggactacaggcacgcgccgccacggccagctaatttttgtgtttttggtggagacggggtttccccatgttggccaggatggtctcaatctcttgacctcgtgatctgcctgcctcggcctcccaaaatgctgggattacaagcatgagcctggccaagtgctattctttatttcagattgagagttgggaaaaattggagcaaataatggatttctttcttgcttaaaatgtatttatatgtatgtcttattatatacaaggcagatttccctggaataaaagtctagaatgtactgcttaattttacacatgtgtgcaggcaatattatctgtgagtgaaaagtggaataatacgtggattgggtcaactgattatcagcttgttaggagtcctctgtgtgagacatggtggtataattgtgaagttctcactgtatgtggatgttcatgtgaaagatagtactttcttcccgtaaatatcttttgatttccatttgtatggaatcccaatgaatgtatctttggaaaac

SEQ ID NO: 72 - DNA, 2201 bp, Homo sapiens
ccttggattatctgaactaaaaattggacagattgatcagctggtagaaaatctacttcctggattttgtaaaggcaaaaacatttcttcccattggcatacatcccatgtctctgcacaatccttctttgaaaataaatatggtaacttagatatatttagtacattacgttcctcttgcttgtatcgacatcattcaagagctcttcaaagcatttgttcagatcttcagtactggccagttttcatacagtctcggggttttaaaactttgaaatcaaggacacgacgtctccagtctacctccgagagattagctgaaacacagaatatagcgccatcattcgtgaaggggtttcttttgcgggacagaggatcagatgttgagagtttggacaaactcatgaaaaccaaaaatatacctgaagctcaccaagatgcatttaaaactggttttgcggaaggttttctgaaagctcaagcactcacacaaaaaaccaatgattccctaaggcgaacccgtctgattctcttcgttctgctgctattcggcatttatggacttctaaaaaacccatttttatctgtccgcttccggacaacaacagggcttgattctgcagtagatcctgtccagatgaaaaatgtcacctttgaacatgttaaaggggtggaggaagctaaacaagaattacaggaagttgttgaattcttgaaaaatccacaaaaatttactattcttggaggtaaacttccaaaaggaattcttttagttggacccccagggactggaaagacacttcttgcccgagctgtggcgggagaagctgatgttcctttttattatgcttctggatccgaatttgatgagatgtttgtgggtgtgggagccagccgtatcagaaatctttttagggaagcaaaggcgaatgctccttgtgttatatttattgatgaattagattctgttggtgggaagagaattgaatctccaatgcatccatattcaaggcagaccataaatcaacttcttgctgaaatggatggttttaaacccaatgaaggagttatcataataggagccacaaacttcccagaggcattagataatgccttaatacgtcctggtcgttttgacatgcaagttacagttccaaggccagatgtaaaaggtcgaacagaaattttgaaatggtatctcaataaaataaagtttgatcaatccgttgatccagaaattatagctcgaggtactgttggcttttccggagcagagttggagaatcttgtgaaccaggctgcattaaaagcagctgttgatggaaaagaaatggttaccatgaaggagctggagttttccaaagacaaaattctaatggggcctgaaagaagaagtgtggaaattgataacaaaaacaaaaccatcacagcatatcatgaatctggtcatgccattattgcatattacacaaaagatgcaatgcctatcaacaaagctacaatcatgccacgggggccaacacttggacatgtgtccctgttacctgagaatgacagatggaatgaaactagagcccagctgcttgcacaaatggatgttagtatgggaggaagagtggcagaggagcttatatttggaaccgaccatattacaacaggtgcttccagtgattttgataatgccactaaaatagcaaagcggatggttaccaaatttggaatgagtgaaaagcttggagttatgacctacagtgatacagggaaactaagtccagaaacccaatctgccatcgaacaagaaataagaatccttctaagggactcatatgaacgagcaaaacatatcttgaaaactcatgcaaaggagcataagaatctcgcagaagctttattgacctatgagactttggatgccaaagagattcaaattgttcttgaggggaaaaagttggaagtgagatgataactctcttgatatggatgcttgctggttttattgcaagaatataagtagcattgcagtagtctacttttacaacgctttcccctcattcttgatgtggtgtaattgaagggtgtgaaatgctttgtcaatcatttgtcacatttatccagtttgggttattctcattatgacacctattgcaaattagcatcccatggcaaatatattttgaaaaaataaagaactatcaggattg

SEQ ID NO: 73 - DNA, 2211 bp, Homo sapiens
atatttataaaaacatataaatcaggtaattctgtttttctaacgtgaaaatctttggtgttatgaaaatttgcaaacatggaaaaccttgaaagaacagtacaattaacatccatatcctatccacttagactcaacaattgttaacattctgtcatatttgctttctgtgttatgtgtgtatttttccccctgaacatttgaaagaaaactataaacgtcaactacttgacatctaaagactttcttgtacatcacctaagaataaggacagtgtcctaaataaacataataaccttatcccaccaaaggaaattatgcctatttccttaatatcatgtactctcagtcttgtttaaatgttttcaccagatgtctctagaattttttgttctttatgaaaaagcatcaaatcaggattcactaattacatttggttgtttagtcttttaatctatttttacatgaattttatcttatttagtgataaatgggtttatatttttttgcctcaagattctccctgtcatgtctcttgttgatatggaaacaatatttatataatacaggaacattaattttggacaagattctgaagtgaaccattagcagagacaagtacggtttgctgtgtttcaaaatattggttattggtgtgacctcagcctgaaaattatataaatgaataattatttattttataggttcatatcgagggattttttaaaaatactttgaatcattctcgttttcattttcttttaggaattcttttagttggacccccagggactggaaagacacttcttgcccgagctgtggcgggagaagctgatgttcctttttattatgcttctggatccgaatttgatgagatgtttgtgggtgtgggagccagccgtatcagaaatctttttagggaagcaaaggcgaatgctccttgtgttatatttattgatgaattagattctgttggtgggaagagaattgaatctccaatgcatccatattcaaggcagaccataaatcaacttcttgctgaaatggatggttttaaacccaatgaaggagtttatcataataggagccacaaacttcccagaggcattagataatgccttaatacgtcctggtcgttttgacatgcaagttacagttccaaggccagatgtaaaaggtcgaacagaaattttgaaatggtatctcaataaaataaagtttgatcaatccgttgatccagaaattatagctcgaggtactgttggcttttccggagcagagttggagaatcttgtgaaccaggctgcattaaaagcagctgttgatggaaaagaaatggttaccatgaaggagctggagttttccaaagacaaaattctaatggggcctgaaagaagaagtgtggaaattgataacaaaaacaaaaccatcacagcatatcatgaatctggtcatgccattattgcatattacacaaaagatgcaatgcctatcaacaaagctacaatcatgccacgggggccaacacttggacatgtgtccctgttacctgagaatgacagatggaatgaaactagagcccagctgcttgcacaaatggatgttagtatgggaggaagagtggcagaggagcttatatttggaaccgaccatattacaacaggtgcttccagtgattttgataatgccactaaaatagcaaagcggatggttaccaaatttggaatgagtgaaaagcttggagttatgacctacagtgatacagggaaactaagtccagaaacccaatctgccatcgaacaagaaataagaatccttctaagggactcatatgaacgagcaaaacatatcttgaaaactcatgcaaaggagcataagaatctcgcagaagctttattgacctatgagactttggatgccaaagagattcaaattgttcttgaggggaaaaagttggaagtgagatgataactctcttgatatggatgcttgctggttttattgcaagaatataagtagcattgcagtagtctacttttacaacgctttcccctcattcttgatgtggtgtaattgaagggtgtgaaatgctttgtcaatcatttgtcacatttatccagtttgggttattctcattatgacacctattgcaaattagcatcccatggcaaatatattttgaaaaaataaagaactatcaggattgaaaac

SEQ ID NO: 74 - DNA, 4087 bp, Homo sapiens
gtgtactaaaaaaatcagagtttatttataaacaaaatagtttatttaaagagaaggtctcttccttattgatatcatggtatgcattaattccatttgttactattgtgcacaaaagccctgttcacaggggaatggtgtaaacatttatactgttttgttcactgtatttagtagacataactgttgaatagttactgaatcatgatgtaaagaatatgtgaccatcttcaggtatgggatttctgaacgtttcaaatttcaatcaatgagcactgtcaacacccacaggagagaataaaattacctgtgcaaaggtgtattgtggtgtgtgtaacttaagattacagttctgtttgagagttaaatgatgtcatagctcacttgctatgctgcttccaggattttgttatatgctgaggtgtaaccatttgtgttgtctgacttttcgtatgatttaattgagccaaatttgggtcagaacacaaatttgaagatgacttttcagtatatgatgggtatttacatttgaacactagaattttaggtctctcaaataattaagaatagagccagttttgaataaagtctagcagaactatgcagctttagtcatttgttttgtctaagtctgtattttatgtgttgtcttcttaagatctataattttggcatttatgtcatttgtgacatagtctgaaaatagagacattgttggcctttaaaatctcagaaatgaatgacttaatttagtgtcctgaaagagcttttaaaagaggattttgtggcaatgtttctcttactacgtactcacaggtttgcaaatgggaaaaaagtttacatttcagtttaggggcatatctaagctatgctattccctttagaaaattagcctccaaaatcttttgtttcaaaatattatattatttcataaataatttcaagcaaatacagacatccacaatgtagaacatgagagaccccctccctcaatttccacctcccaagggaagtttatgtatttttctaggcccttttctatgtctttacatctctgtctcacacacacacacgtatacacacacacagtttatttttaataaaataggattataccacacacatcctgtcacttgcttttttgcttaagagtatatctaagagaatcctttgtgtcagtgaagctggagctacctcattcttttaactggctgcgtggcgttccattgagtgtctgtcatcatgtgtttagccgagtggatggatagtctgcttgtttttagtttttgctcttaacaaacactgctgcagtcagcatccttgcacagatttctttgtatacttgtattagtatttctgtaagatctgagaagtggaatttgtagggtcataggttatgtacacttaagtttttgacactcactgccaagtcatctgtcagaattctaaactaaagacatgtttggagtgtggatttatcttcagtttttctttggacaagaggaagctgtgaaagattttgctatcagaaaattttggttctttgtcttttgcacatgttctttgagtcttagtatctgtaacgtggcgctactctctctatcatgggggggcatgttttgacattaaattgacttttaagaaaaacatgtcactaacctgaagctcagccacacagtgacttttaaggttttatttagactttactgttgttctcatgagagtaggtacagactgcataaggtttagaatcccagcatatgtctgaaacgacgggactttcactgtgatttccaccagagaaattatagcagagtggctgagcatgtgctctgaggccaggccccagctctgctgctgacgagctgtgtggtcctgggcagagtggtctccgagttccagtccctcctctgtaaaatgggcatgattagagtgcccaccgcattagggatgttggggtgagtcagtgtgaccccacgtgcacagaaagtgctgcgagtggtgcatggtgagaggttgatgcaggtacttagcccttggggaacacaggtagttccttttcactgtgtttaatttgggaaaatccagatccacatcattgtagagtctgagggttagaaggaagtcattgtgtctaacataacaacagagcagtttgtgtcactgagctccagtctgtgctggattattgatattgttggtggcggtcaccattcctggaaagggactgtcccaagccacttaccttcccgaggagtctgctggttctccttgaggatagtgcttagataacagactcattaaacatttactgagtgtctgtcagggatcattcacatccacatcatcctcccggcccctccccgtgttgttcatggagggagtactggcggtccccattttcatgtatggagacttcaggtgaaagaagttaagtgaattctttgttgagtcacaaatcttgagccagtcagaatttgaacctaagatttttgactgctggttgtcacacttcccgccccacactcaactgttgtgtgaatgagccagacacattgcttaacctgagtccgagatggacaatggtataggaaagatattcggtatggagaatcagatgttaacttgtgttgctatttttgttttgttttgttttgttttgtttttgagacaaggtcttgctctgtcacccaggctagagtgcagtggcatgatcagggcttactgcagcctcaccctcgatttcctgggctcaagcaatcctcccacctcagcccccaagtagctgggcctacaggtgcgtgctaccacgcctggccaattttttaaattttagcacagatgaggtctcactatgttgcccgggctggtctcgaactcctgagctcaagggatcctcccgcctcagcctcccaaagtgctggtgttacaggcataagccaccacgcctggcctgtgttgctattatatttggcaggaacccagagtccagaacatttcatctatgatgggttagataatgtgtctagttgtttgcatgccaatttcagtagcctcagttattcaacctaggagatttttctacctctttactaccctgctgaagttgctcttcagcagaaaatctttgtggaacacattccacactttgaaatcttcgtggaacaaaagatatttgtggaaccaatctttgtggaacatattccagctttttgaatgagtgcatatccagtagtacctttaaagtaacactttgtacataacaaatactcagcaaatgtgaaactttatttgctcttacttcaaaattagtccaaaatgttggaaataaaatataagacattgatctagatatgaggtttttctccttcattctcagctgtcgaagaaatcaaagtagcatatgcacaaggttaaaaaccacatatacaaatactatagaacagcttataatgaaaaccttgcctgcctttataaaaaatgtgattatcttcttctgttaatgtcaataaaagatggtttgtcctagaaggtctataaatggtattatgttctggaggaaacctagcaaaaactttgctagtttagtacttgtctctaaattgatgttcacccatttcaatattgcacttattaatggtctttatttttctagcatagataacaattgattctttagattcatatatggaggtaattcttgctttctaaagaaaggaatatggcacattggaaccattttattcaccagtggatttacccttagagtatttttagatctgagctgatgacttgtgagagaaaaagggaacagagtaaagccatggaagccatgaacagtaagagactgccgcctggcatggtttcttcttctgcagaagatgaaactgaggagaaacaagacaacatccttcataccaggaatggtcaagataatgcaagaagaaaaaagctttcaaacaaatcagaaggcagtcaacaaacagaaagggggacattccttccctggcagttactcaaaactgaaattgcttattgtgtacaccggggcttgtacttggggaatttaataaaaatgctcattacc

SEQ ID NO: 75 - DNA, 1254 bp, Homo sapiens
aaaaatgtgtctgcatatgtggtgcatccttccatctccacaaaccatttgattcttgaaatattgtttgacctcattgctgtgtgtgaatatttctccacatgcttcagatgcacattcctagtctctgcttcctaaggggggaaccaccacacattggggggaaaaaagacattttcctacacccacccaccttgttgaaagggaggtaggtttggggcttcaggccaggcactgactatgaaacattagctgcagtgtgcaggacagctttgaggtccagctgaagtcaggaagcaaaacaaatgtagatgtcacttcaaacataatttcaactgtcaccagatcaactctacattcaaggagtgtggacgctgcagtgcagttgtgagggcagttagcagccgcctcttctgcatcctgtcaactctgattagttagagtttaggctcaaaagagttggtggactgagattgaaatttggttgtgcaagagaaaggaaaggagacacttagtaccaccagtttcagcaataaagaagggtcattctgtattcaaaattgtactgtagataaatcattcatgagattgtaaaaaatgtttgtcttgtgaccttgtgcttttgaagtcagacaaaaccgtgtaatcaacttgcacaaaaagagggtacacagtgaacatataaacacagacctaatcaaacaggagcagattcctcatggtgcttgtttattatatatatttaatcctgcttgacactttacccaagggagatggtcccttttatcagttgaatgttagcagcgttatttcagagtgtggtgactggttagagaaactcatgtactcaaccagccacagtttcaaacaaaatttttatgtgcaaaggacagcaaccttcttgtatgttaaaccaccagtacgctttgtacatctgtgataacgcctgttttatattcaaatgaacaaataaaagcttttatttttgttgctctgaaaatagcagtttcttaattggtcccctggaaagatgtctgggacagctttaatcccgggaaggaagtgactcctacagggaaatgtatctgactctgtttacataatttgttgcattacttagtacagataatcatactttgaaaaatgtttaaattttgatgtgggcatttattgctaaaaataattcctatggcaacaaatgttttgtgaaatgttttttttaattcttttaaatatatctaaatatatttgttc

SEQ ID NO: 76 - DNA, 5248 bp, Homo sapiens
agtggaaggagcaggcgcttgagctcgagcgacggcgctggcggagacgccggctgctcctcccctccccgccggtattaatctctggagaagacacatccacagttagcactttcttcagatgctgacgctcggtgaacagttgcctttggtcacaagatttagaagacacagtgtccatcctcccagattggatctctttttcatatggatcttctgtttctatgtctttttaaaaaataactttttgggaaaccttttggattacaactgttcatcctcacctatgcaaagaaagggaagctattgctgggattttgaggagcttttcctaaaaggattgtacaccttagaagtgcttaaggaagagtgatgaagataggcatgaagccttcgtctcacagctgcatgcgtagtcactgttgaagcaaatgcctacctaatttgacactcttggtgtgtttaaaaaatttttttgagtttgcaaataagcatattaagtctactgatggagccttcgggcagtgaacagttatttgaggaccctgatcctggaggcaaatcccaagatgcagaggccagaaagcagacagaatcagaacaaaaattgtctaaaatgacccacaatgctttggagaacattaacgtgattggccaaggcttgaagcatctcttccagcaccagcgcaggaggtcatcagtgtctccacatgatgtgcagcaaattcaggcagatccagaacctgaaatggatctggaaagccagaacgcatgtgctgagattgatggtgtccccacccaccccacagctctgaatcgtgtcctgcagcagattcgagtgccacccaagatgaagagagggacaagcttgcatagtaggcggggcaagccagaggccccaaagggaagtccccaaatcaacaggaagtctggtcaggagatgacagctgttatgcagtcaggccgacccatgtcttcatccacaactgatgcacctaccggctctgctatgatggaaatagcttgtgctgctgctgctgctgctgctgcatgtctaccaggagaggagggaactgcggagcggatcgaacggttggaagtaagcagccttgcccaaacatccagtgcagtggcctccagtaccgatggcagcatccacacagactctgtggatggaacaccagaccctcagcgcacaaaggctgccattgctcacctgcagcagaagatcctgaagctcacagaacaaatcaagattgcacaaacagcccgggacgacaacgttgctgaatacttgaagcttgccaacagtgcagacaaacagcaggctgcccgcatcaagcaagtctttgagaagaagaaccagaaatctgccccaactatcctccagctgcaaaagaaacttgagcactaccacaggaagctcagagaggtagagcagaatgggatcccccggcagccaaaggatgtcttcagggacatgcaccagggtctgaaggatgtaggagcaaaggtgactggcttcagtgaaggtgtggtggatagtgtcaaaggtgggttttccagcttctcccaggccacccattcagcagcaggcgctgtagtctcaaagcccagagagattgcctcactcattcggaacaaatttggcagtgcagacaacatccccaacctgaaggactctttagaggaagggcaagtggatgatgcggggaaggctttgggagtgatttcaaactttcagtctagcccaaaatatggtagtgaagaagattgttctagtgccacttcaggctcagtgggagccaacagcaccacagggggcatcgctgtaggagcatccagctccaaaacaaacaccctggacatgcagagctcaggatttgatgcactactacatgagatccaggagatccgggaaacccaggccagactagaggaatcctttgagactctcaaggaacattatcagagggactattccttaataatgcagaccttacaggaggagcgatatagatgtgaacgattggaagaacagctaaatgacctaacagagctccaccagaatgaaatcttgaacttgaagcaggaactggcaagcatggaagaaaaaatcgcgtatcagtcctatgaacgggcccgggacatccaggaggccctggaggcatgccagacgcgcatctccaagatggagctgcagcagcagcagcagcaggtggtgcagctagaagggctggagaatgccactgcccggaaccttctgggcaaactcatcaacatcctcctggctgtcatggcagtccttttggtctttgtctccactgtagccaactgtgtggtccccctcatgaagactcgcaacaggacgttcagcactttattccttgtggtttttattgcctttctctggaagcactgggacgccctcttcagctatgtggaacggttcttttcatcccctagatgatgctggcacagaaggcattgttccctaccctctggcgagtgcatgcagcagagagttagacagcaacttacctactctgaagttttctacaacaaaaaaagagttgagtgaatctgtttacatttagaataatgtttttttcttcaagagacgcaattgcaatagtattttttagattttatccaagaagttttttgggcgaaaatcttggatcatttttatgtagcatgattttccttgggatgcaaatcttaaaacagtcctttaatatgaaccaacaatctggagcacaccgaagggcaatctaaattgtggcttgaaggactgcactaaaacccactaaaaagatgcgaaaacctgatgagggcaaaccagttaaacctaacaccctgccttgtctgggctcatcacctctccctatcccagactaactttactgtgaaatcctacacattccatgtctgaatttttggattcggggtggattttcgttgtccgtggaagaacacatggatctctctggctttctcacccaagttggccacttacgctaatcctggaagtatgatcacttttgaacctgccccttaaccttgacgaggatacaaaagtgaaagcatcatcccccaaaggatcactgcacagtcctactacagtatttttaagtagccctctaaatacttaattttaagcaaaatcccttggccgcacttttaaggtttttttatatgtgtatagttaccaacctaaaaataaaaaatccgaacagcatacttgaagaatgtaatactcaaactctcagtgcttccttatggtttctaataggattttttattattgttattattattattgggtttttttggacagggttgggagggtcttttatttttcctttgaaataaagaagtgatgtttttaaatgaagaaatgtgtggatatttaagtgtgctgctccctcttgtcttgaaacagtttgagtaagaaagtcttgctgtaaatgctgccctctgccgcctttgttttgagatgcagtttaaactccctctggctgctgctgctgctttttggtgtcccgacatacctacgcccccgttttatgggtttggcttagttgaagaggaaagggttgtgcaaggagagcaggaggctgtttccaaaaaccagtgtagtaggatagggatttttttttttttttttgccccaagaaaacgttcacccagtgatcttgggctggggttgtctttaggaaaagttgagactataagagtcataaataagtccttgtgtttccttaatttattttgttaacacccctaattacaaccaaagtgatgatgtggagtcttctgtcttcattttggccccagcattcttaatttcaaagctttattctgtctgcctaagagaatcaaccaaaggtgattctcctaaagagcagtgaaggaaatgtcaggttagcaggacccaagttttgggtgtgaaatgttgccagcttcctataatgtaaacggacttgttaacctaacctaattatgctcagtggacttctatagatggttttgaaaaatgaactgagctgccttcccgcatcgcataaccagttccatcatcctggtggaacttgaacatttagagtttatctagagagcttggttaatctttccatattatttgtagtattggtcacaaatgctgttccctcttagcctcattctgtgcaaccaagtgcatataagatgccctgaaaagagtaacaaagtatgctttgcctgtttccacttaccaggaaattccttcagaactagattagcattgccctgcctgtctgaaaggacagtttacctaatggtgccagcctccttttgctttggcaagctggatttctcagagccagcatgttgtttccataactactttgatattttaactcaggtactccagtcttcaccccaacctcagctgattgtagtacacctgctagctctgttgccccctcaaaactgcacccagagcagggccacaagggtgctttttttctttaaagaaaaaaaaattagaaccaattcatgttcatgccaaaaacaaattgtccccaagcctatatgtattaaaatgttaactttgcctaaaaatattgcagtgactttttaggcaggagtgccaaaggacactatgaactttttgaactgacagtttctcctaactttctgctttagcgtaattgctcagagtagagagcccccacaaagttatttaaaagatgccctagcagcaatccaccagtttttctaagctagaacctttgagtcccccaaactgcctgaagacttaagttttgtgggcactggaagtcactttgatagatggattgaaactgttcctatttgccctgggacggtttctatctatcaaaggaaggttttcacctgtagaaagccccctgcctccagccaaatagtcccatgctgactttctatcttcctttctcaaactgtcttaggaaggaccttcagtgcagatcaggtgcagtaatggctttcttgtcccttaattattcaccagacccagaagttgtacgcatttaatgctgtttgtaaccatgcatctgttttcattctttgctgtaccttttgctgcccatcctgttacttttgagtttctttcattgtggttgttcttgggttcttttgtcttgtcagagctcttctataacctcgctctaatggcttaacagttgttctgggtggaaacgtcccctcatttgaatgctcctct

SEQ ID NO: 77 - DNA, 2353 bp, Homo sapiens
ggggctgggcggcggggacagcggggacggcacggcgcgcgcagcttctaagtgccagatgatggaggagcgtgccaacctgatgcacatgatgaaactcagcatcaaggtgttgctccagtcggctctgagcctgggccgcagcctggatgcggaccatgcccccttgcagcagttctttgtagtgatggagcactgcctcaaacatgggctgaaagttaagaagagttttattggccaaaataaatcattctttggtcctttggagctggtggagaaactttgtccagaagcatcagatatagcgactagtgtcagaaatcttccagaattaaagacagctgtgggaagaggccgagcgtggctttatcttgcactcatgcaaaagaaactggcagattatctgaaagtgcttatagacaataaacatctcttaagcgagttctatgagcctgaggctttaatgatggaggaagaagggatggtgattgttggtctgctggtgggactcaatgttctcgatgccaatctctgcttgaaaggagaagacttggattctcaggttggagtaatagatttttccctctaccttaaggatgtgcaggatcttgatggtggcaaggagcatgaaagaattactgatgtccttgatcaaaaaaattatgtggaagaacttaaccggcacttgagctgcacagttggggatcttcaaaccaagatagatggcttggaaaagactaactcaaagcttcaagaagagctttcagctgcaacagaccgaatttgctcacttcaagaagaacagcagcagttaagagaacaaaatgaattaattcgagaaagaagtgaaaagagtgtagagataacaaaacaggataccaaagttgagctggagacttacaagcaaactcggcaaggtctggatgaaatgtacagtgatgtgtggaagcagctaaaagaggagaagaaagtccggttggaactggaaaaagaactggagttacaaattggaatgaaaaccgaaatggaaattgcaatgaagttactggaaaaggacacccacgagaagcaggacacactagttgccctccgccagcagctggaagaagtcaaagcgattaatttacagatgtttcacaaagctcagaatgcagagagcagtttgcagcagaagaatgaagccatcacatcctttgaaggaaaaaccaaccaagttatgtccagcatgaaacaaatggaagaaaggttgcagcactcggagcgggcgaggcagggggctgaggagcggagccacaagctgcagcaggagctgggcgggaggatcggcgccctgcagctgcagctctcccagctgcacgagcaatgctcaagcctggagaaagaattgaaatcagaaaaagagcaaagacaggctcttcagcgcgaattacagcacgagaaagacacttcctctctactcaggatggagctgcaacaagtggaaggactgaaaaaggagttgcgggagcttcaggacgagaaggcagagctgcagaagatctgcgaggagcaggaacaagccctccaggaaatgggcctgcacctcagccagtccaagctgaagatggaagatataaaagaagtgaaccaggcactgaagggccacgcctggctgaaagatgacgaagcgacacactgtaggcagtgtgagaaggagttctccatttcccggagaaagcaccactgccggaactgtggccacatcttctgcaacacctgctccagcaacgagctggccctgccctcctaccccaagccggtgcgagtgtgcgacagctgccacaccctgctcctgcagcgctgctcctccacggcctcctgaacgtccgtcctcaggagcacagcctcacggacagtgccaaaccctgtgggtctccaggggcttgggaaatgtgttctttcccaagagtatcaaaggaaagaatcaaatttcttgcccggtcactggcactccagaagacagcgtgccggaaccggcagctctcacctttctgtgacttgttcggaattaactcctctggatggaaacttccatcttacttggttacatcacggctctggttcagatacaacttcatgattttgctactatcatttttcacttttcaaagaatttaacctattttacagcagttcagttctgctagtgagtagttttcctctcctaccttccttctaaaaacctgattcatgcacagcgtttgacacacatggagtctgccagtgtgccttctctgcttcagacaagagatctgccatttcatgcccttgtgactacctatcattggccctgcaataaaatcatttatttttc

SEQ ID NO: 78 - DNA, 1212 bp, Homo sapiens
ggctttgaccgctatcgccaggagtggatggactatggctgtgcacaggaggcagagggcaggatgtgcgaggacttccaggatgaggaccacgactcagcctcccctgacacttccttcagcccctatgatggagacctcaccactacctcctcctccctcttcatcgacagcctcaccacagaagatgacaccaagttgaatccctatgcaggaggagacggccttcagaacaacctgtcccccaagacaaagggcactcctgtgcacctgggcaccatcgtgggcatcgtgctggcagtcctcctcgtggcggccatcatcctggctggaatttacatcaatggccaccccacatccaatgctgcgctcttcttcatcgagcgtagacctcaccactggccagccatgaagtttcgcagccaccctgaccattccacctatgcggaggtggagccctcgggccatgagaaggagggcttcatggaggctgagcagtgctgagaacaccaagtctcccctttgaagactttgaggccacagaaaagacagttaaagcaaagaagagaagtgacttttcctggcctctcccagcatgccctgggctgagatgagatggtggtttatggctccagagctgctgctcgcttcgtcagcacaccccgaatattgaagagggggccaaaaaacaaccacatggattttttataggaacaacaacctaatctcatcctgttttgatgcaagggttctcttctgtgtcttgtaaccatgaaacagcagaagaactaacataactaactccatttttgtttaaggggcctttacctattcctgcacctaggctaggataactttagagcactgacataaaacgcaaaaacaggaatcatgccgtttgcaaaactaactctgggattaaaggggaagcatgtaaacagctaactgtttttgttaaagatttataggaatgaggaggtttggctattgtcacatgacagactgttagccaaggacaaagaagttctgcaaacctcccctggacccttgctggtgtccagatgtctgcggttgtcagccccttcctttcccccgacctaaacataaaagacaaggcaaagcccgcataattttaagacggttctttaggacattagtccaccatcttcttggtttgctggctctccgaaataaagtccctttccttgctcc

SEQ ID NO: 79 - DNA, 432 bp, Homo sapiens
ggcgaaggcagcggcaggtcgggagcaagatggcgctgcggccaggagctggttctggtggcggcggggccgcgggagctggcgcggggtccgccgggggaggcggcttcatgtttcctgttgcaggtgggataagaccccctcaagcaggcctgatgccgatgcagcaacaaggatttcctatggtctctgtcatgcagcctaatatgcaaggcattatgggaatgaattacagctctcagatgtcccaaggacctattgctatgcaggcaggaataccaatgggaccaatgccagcagcgggaatgccttacctaggacaagcacccttcctgggcatgcgtcctccaggcccacagtacactccagacatgcagaagcagtttgccgaagagcagcagaaacgatttgaacagcagcaaaaactcttag

SEQ ID NO: 80 - DNA, 68 bp, Homo sapiens
taggccatgaaggccgaattcggccttcatggcctataggccatgaagcccgattgaattctagacct

SEQ ID NO: 81 - DNA, 2118 bp, Homo sapiens
  misc_feature 1041,1188: n = a,c,g, or t
gttgttcccaacaaaagcaataatgaaatagtcctggtgctccaacagtttgattttaatgtggataaagccgtgcaagcctttgtggatggcagtgcaattcaagttctaaaagaatggaatatgacaggaaaaaagaagaacaataaaagaaaaagaagcaagtccaagcagcatcaaggcaacaaagatgctaaagacaaggtggagaggcctgaggcagggcccctgcagccgcagccaccacagattcaaaacggccccatgaatggctgcgagaaggacagctcgtccacagattctgctaacgaaaaaccagcccttatccctcgtgagaaaaagatctcgatacttgaggaaccttcaaaggcacttcgtggggtcacagaaggcaacagactactgcaacagaaactatccttagatgggaaccccaaacctatacatggaacaacagagaggtcagatggcctacagtggtcagctgagcagccttgtaacccaagcaagcctaaggcaaaaacatctcctgttaagtccaatacccctgcagctcatcttgaaataaagccagatgagttggcaaagaaaagaggcccaaatattgagaaatcagtgaaggatttgcaacgctgcaccgtttctctaactagatatcgcgtcatgattaaggaagaagtggatagttccgtgaagaagatcaaagctgcctttgctgaattacacaactgcatcattgacaaagaagtttcattaatggcagaaatggataaagttaaagaagaagccatggaaatcctgactgctcgtccgaagaaagcagaagaactaaagagactcactgaccttgccagtcagatggcagagatgcagctggccgaactcagggcagaaattaagcactttgtcagcgagcgtaaatatgacgaggagctcgggaaagctgcccggttttcctgtgacatcgaacagctgaaggcccaaatcatgctgtgcggagaaattacacatccaaagaacaactattcctcaagaactccntgcagctccctgctgcttctgctgaatgcgcacgcagcaacctctgggaaacagagtaacttttcccgaaaatcatccactcacaataagccctctgaaggcaaagcggcaaaccccaaaatggtgagcagtctccccagcaccgcngacccctctcaccagaccatgccggccaacaagcagaatggatcttctaaccaaagacggagatttaatccacagtatcataacaacaggctaaatgggcctgccaagtcgcagggcagtgggaatgaagccgagccactgggaaagggcaacagccgccacgaacacagaagacagccgcacaacggcttccggcccaaaaacaaaggcggtgccaaaaatcaagaggcttccttggggatgaagacccccgaggccccggcccattctgaaaagccccggcgaaggcagcacgctgcagacacctcggaggccaggcccttccggggtagtgtcggtagggtttcacagtgcaatctctgccccacgagaatagaagtttccacagatgcagcagttctctcagtcccggctgtgacgttggtggcctgagctaggaggaaaaagagcagttttcactcagttttggttccctgcccgaggtgctgacccaattcgctgccaaaagagtgtcaatcagaatatacaaatcccgtatggttgtgtcatcctctcttaatcatttttactaattctaataatcagctctagcttgcttcataattttcatggctttgcttgatctgttgatgctttctctcatcaagactttgcagcattttagccaggcagtatttactcattattaggaaaatcaagatgtggctgaagatcagaggctcagttagcaacctgtgttgtagcagtgatgtcagtccattgattgtctttagagagttaatgttacaaaaaagaattcttaataatcagacaaacatgatctgctgaggacacatgcgcttttgtagaatttaacatctggtgtttttctgaaaaaatatatatacatatattgctttatttgaaacaaattaaaatatgctgcatttg

SEQ ID NO: 82 - DNA, 1327 bp, Homo sapiens
cgtgaagggaggcagtgagagcagacatctgtgcctcattcctgatctcaaggggaaagcaagaacaagggaggcttcctcaggatctcgaacctgcggaaggaggaccagtctgtgtacttctgccaagtccagctggacatacagatcagggaggctgtcgtggcagtccatcaaggggacccacctcaccatcacccaggccctcaggcagcccctccacagggcccctctcctgcctggacagctctgctggtctccccgtcccctggagaagaacaaggccatgggtcggcccctgctgctgcccctgctgctcctgctgcagccgccagcatttctgcagcctggtggctccacaggatctggtccaagctacctttatggggtcactcaaccaaaacacctctcagcctccatgggtggctctgtggaaatccccttctccttctattacccctgggagttagccatagttcccaacgtgagaatatcctggagacggggccacttccacgggcagtccttctacagcacaaggccgccttccattcacaaggattatgtgaaccggctctttctgaactggacagagggtcaggagagcggcttcctcaggatctcaaacctgcggaaggaggaccagtctgtgtatttctgccgagtcgagctggacacccggagatcagggaggcagcagttgcagtccatcaaggggaccaaactcaccatcacccaggctgtcacaaccaccaccacctggaggcccagcagcacaaccaccatagccggcctcagggtcacagaaagcaaagggcactcagaatcatggcacctaagtctggacactgccatcagggttgcattggctgtcgctgtgctcaaaactgtcattttgggactgctgtgcctcctcctcctgtggtggaggagaaggaaaggtagcagggcgccaagcagtgacttctgaccaacagagtgtggggagaagggatgtgtattagccccggaggacgtgatgtgagacccgcttgtgagtcctccacactcgttccccattggcaagatacatggagagcaccctgaggacctttaaaaggcaaagccgcaaggcagaaggaggctgggtccctgaatcaccgactggaggagagttacctacaagagccttcatccaggagcatccacactgcaatgatataggaatgaggtctgaactccactgaattaaaccactggcatttgggggctgtttattatagcagtgcaaagagttcctttatcctccccaaggatggaaaaatacaatttattttgcttaccatac

SEQ ID NO: 83 - DNA, 1327 bp, Homo sapiens
cgtgaagggaggcagtgagagcagacatctgtgcctcattcctgatctcaaggggaaagcaagaacaagggaggcttcctcaggatctcgaacctgcggaaggaggaccagtctgtgtacttctgccaagtccagctggacatacagatcagggaggctgtcgtggcagtccatcaaggggacccacctcaccatcacccaggccctcaggcagcccctccacagggcccctctcctgcctggacagctctgctggtctccccgtcccctggagaagaacaaggccatgggtcggcccctgctgctgcccctgctgctcctgctgcagccgccagcatttctgcagcctggtggctccacaggatctggtccaagctacctttatggggtcactcaaccaaaacacctctcagcctccatgggtggctctgtggaaatccccttctccttctattacccctgggagttagccatagttcccaacgtgagaatatcctggagacggggccacttccacgggcagtccttctacagcacaaggccgccttccattcacaaggattatgtgaaccggctctttctgaactggacagagggtcaggagagcggcttcctcaggatctcaaacctgcggaaggaggaccagtctgtgtatttctgccgagtcgagctggacacccggagatcagggaggcagcagttgcagtccatcaaggggaccaaactcaccatcacccaggctgtcacaaccaccaccacctggaggcccagcagcacaaccaccatagccggcctcagggtcacagaaagcaaagggcactcagaatcatggcacctaagtctggacactgccatcagggttgcattggctgtcgctgtgctcaaaactgtcattttgggactgctgtgcctcctcctcctgtggtggaggagaacgaaaggtagcagggcgccaagcagtgacttctgaccaacagagtgtggggagaagggatgtgtattagccccggaggacgtgatgtgagacccgcttgtgagtcctccacactcgttccccattggcaagatacatggagagcaccctgaggacctttaaaaggcaaagccgcaaggcagaaggaggctgggtccctgaatcaccgactggaggagagttacctacaagagccttcatccaggagcatccacactgcaatgatataggaatgaggtctgaactccactgaattaaaccactggcatttgggggctgtttattatagcagtgcaaagagttcctttatcctccccaaggatggaaaaatacaatttattttgcttaccatac

SEQ ID NO: 84 - DNA, 1922 bp, Homo sapiens
gagacggagtctcgctgtcgcccaggctggagtgcagtggcgcgatctcggctcactgcaggctccaccccctggggttcatgccattctcgtctcagcctgcagaggagctgggactacaggcgcccgccaccccacccggctaattttttgtatttttagtagagatggggtttcaccgtgttagtcaggatggtctcgatctcgtgatccgtccgcctcggcctcccaaagtgctgggattacaggcgtgagccactgcccccggccaagaaaaagatatttttgagttagtaagttgtatgttttctttatagtcacattataatgaattagacttgttatgaaattggaacttctatttaatttttaaaataaatgacttatgtttagtaaatgaatatcaatcacaattgacccttaacaatgtggaatttagggatgcttgattccctctgcagtcaaacatctgtgtataacttttgactcccccaagaacgtaactactaatagctaactgttgaccagcagccttattgataacataaacagtcaattaagatatgtttggtatggtatatgtattaatatgctgtattcttacaataaaggaagctaggaaaataaactgttaagaaaatcataaggcagaaaaaatacacttactgttcattaaatgcaagtagatcattatataactcttcatcatagtcttcaagttgagcaggctaaggagaaggaggaagaggaagattggtcttcgctgtctcaggtggtagaggtgggagaaaatctgctcataagtagacccctgcagttcaaatccgtgttgttcaaaggctaactatattacatagtgatttgtgtcactgaaaaaaagaaattagtttcaaaactggaaactcagcaatacctttctggcaccataaacaaatggcaataagaactgtgaaatggccaggtgtgctgcccacacctgtagtcccagcaagttgggaggcctaggtgggaggatcgcttctgtccagaagttccagaccagcctgggtgacatagtgagaccacatctctacaaaaacaaatacaaaattagctgggtgttttggtgcacacctgtaaccccagctacttgggagactgagatgggaggctcgcttgagcctgggagtcaaggctgtagtgagctgtgatcatgatcacaacctggatgacagagtgagaccctgtctcagaaaaaaacaaaaacaaaaacacaaacaaaaccctgccaaacatacccaatgtgcactaatactaatgggaaattattttttaaagataccttctgagtgcagaagtcagaaaagcaattccttgttgagaagaacaggtcatgttacatacttataaaccaacaaggtgtcactattattgactttcccccaatttgaaatcgaatgaggtatatttacttcattagaacaagatgtgtttttctacctgctggttaattgctgttaacagtaattttgttagaacaagatatgctgttaccattagccaaaagattatcataataaatattcaaatagcccaactctaggctcaacaaattataatgaaagtataaaaatgtttcacaataacaaaaaatgcttctgtgcttccaagatgtgatgcctaatgcattggacaatctgaactgtaaggggacacctttaatttagtacatattaatcaaagaacttctgtaagttaggttttgcacgttatgggagacaaacatgaaatagacatagttttggtctttgaggtgctcataatagaatagagctttatttaatttctgtgtttttttcaacagaattttcaaggaaatcatttattcatttgtccacttcacaaataattatcaaatgtcttttagattgaattctagacct

SEQ ID NO: 85 - DNA, 1432 bp, Homo sapiens
ggcggccgagactggcgggggtggacgcccgggccgggctgcgcccgcttcttgcagctgtgaattcctttggacaattgatgatatttatcattgtgcccagtttctacaaataaaagatgggtggattattttctcgatggaggacaaaaccttcaactgtagaagttctagaaagtatagataaggaaattcaagcattggaagaatttatggaaaaaaatcagagattacaaaaattatgggttggaagattaattctgtattcctcagttctctatctgtttacatgcttaattgtatatttgtggtatcttcctgatgaatttacagcaagacttgccatgacactcccattttttgcttttccattgatcatctggagcataagaacagtaattattttcttcttttccaagagaacagaaagaaataatgaagcattggatgatttaaaatcccagaggaaaaaaatacttgaagaagtcatggaaaaagaaacttacaagacggctaaattaattcttgaaaggtttgatccggactcaaagaaagcaaaggagtgtgagccgccatctgctggagcagctgtaactgcaagacctggacaagagattcgtcagcgaactgcagctcaaagaaacctttctccaacaccagcaagccctaaccagggccctcctccacaagttccagtatctcctggaccaccaaaggacagttctgcccctggtggacccccagaaaggactgttactccagccctatcatcaaatgtgttaccaagacatcttggatcccctgctacttcagtgcctggaatgggtcttcatcctccaggtccacctttagcaagacctattctcccccgagaacgaggtgctttggatagaattgttgaatatttggttggtgatggtccacaaaacaggtatgcacttatatgtcagcagtgtttttctcataatggcatggctttgaaggaagaatttgaatacattgcttttcgatgtgcctactgttttttcttgaaccctgcaagaaaaaccagacctcaggctccaagacttcctgagtttagttttgagaagaggcaggtggtggaaggttcaagttcagttggtcccttgccatcaggaagtgtgctttcatcagacaaccagtttaatgaagaatctttagaacacgatgttcttgatgataatacagagcagacagatgcaaaataccagctacagaacagacaaaccaagtgattgaaaaagcatctgactcagaggaaccagaggagaaacaagagactgagaatgaggaagcctcagtgattgaaaccaactccacagttcctggagctgattctattcctgatcctgaactaagtggagaatctttgacggcagagtagtaaatgcttccacgtgccttcaactgg

SEQ ID NO: 86 - DNA, 1662 bp, Homo sapiens
ttttttttttttttttttttttttgaaggcacgtggaagcatttactactctgccgtcaaagattctccacttagttcaggatcaggaatagaatcagctccaggaactgtggagttggtttcaatcactgaggcttcctcattctcagtctcttgtttctcctctggttcctctgagtcagatgctttttcaatcacttggtttgtctgttctgtagctggtattttgtcatctgtctgctctgtattatcatcaagaacatcgtgttctaaagattcttcattaaactggttgtctgatgaaagcacacttcctgatggcaagggaccaactgaacttgaaccttccaccacctgcctcttctcaaaactaaactcaggaagtcttggagcctgaggtctggtttttcttgcagggttcaagaaaaaacagtaggcacatcgaaaagcaatgtattcaaattcttccttcaaagccatgccattatgagaaaaacactgctgacatataagtgcatacctgttttgtggaccatcaccaaccaaatattcaacaattctatccaaagcacctcgttctcgggggagaataggtcttgctaaaggtggacctggaggatgaagacccattccaggcactgaagtagcaggggatccaagatgtcttggtaacacatttgatgatagggctggagtaacagtcctttctgggggtccaccaggggcagaactgtcctttggtggtccaggagatactggaacttgtggaggagggccctggttagggcttgctggtgttggagaaaggtttctttgagctgcagttcgctgacgaatctcttgtccaggtcttgcagttacagctgctccagcagatggcggctcacactcctttgctttctttgagtccggatcaaacctttcaagaattaatttagccgtcttgtaagtttctttttccatgacttcttcaagtatttttttcctctgggattttaaatcatccaatgcttcattatttctttctgttctcttggaaaagaagaaaataattactgttcttatgctccagatgatcaatggaaaagcaaaaaatgggagtgtcatggcaagtcttgctgtaaattcatcaggaagataccacaaatatacaattaagcatgtaaacagatagagaactgaggaatacagaattaatcttccaacccataatttttgtaatctctgattttttccctaaattcttccaatgcttgaatttccttatctatactttctagaacttctacagttgaaggttttgtcctccatcgagaaaataatccacccatcttttatttgtagaaactgggcacaatgataaatatcatcaattgtccaaaggaattcacagtcttccgctgcctcctttgcttttaaagcctgttctgccaagtctcgctggagaaggaaacccctgaaactggtcctggtggtctcagaccgccgcgcgagcgaagagtggggaggacaaaggttggggagttgagaaggatggagatgggtgcatctggaagggagtccgtcctgaggagtcccccatcagctgtcagccagccagcagcaaagcaaattaagactacacagctccgaagaagccagttcccaaccaagccagtggag

SEQ ID NO: 87 - DNA, 1662 bp, Homo sapiens; identical to SEQ ID NO: 86

SEQ ID NO: 88 - DNA, 568 bp, Homo sapiens
aagacgagcatccccctcctctccctgttagaaatgttagtgccccgcactgtgccccaagttctaggccccccagaaagctgtcagagccggccgccttctcccctctcccagggatgctctttgtaaatatcggatgggtgtgggagtgaggggttacctccctcgccccaaggttccagaggccctaggcgggatgggctcgctgaacctcgaggaactccaggacgaggaggacatgggacttgcgtggacagtcagggttcacttgggctctctctagctccccaattctgcctgcctcctccctcccagctgcactttaaccctagaaggtggggacctggggggagggacagggcaggcgggcccatgaagaaagcccctcgttgcccagcactgtctgcgtctgctcttctgtgcccagggtggctgccagcccactgcctcctgcctggggtggcctggccctcctggctgttgcgacgcgggcttctggagcttgtcaccattggacagtctccctgatggaccctcagtcttctcatgaataaattccttcaacgcc

SEQ ID NO: 89 - DNA, 1091 bp, Homo sapiens
aaagcctgttaaaagcaagaaaaaccaaagcctaaagagacaaatcattagaagctgattcatatatgacacagatgttggaattattagatggaatataaaataactatcattaatatggtacaagctttaatggaaaaagtagacaagttacaagaacagatgggtaatgtaagctgacagaattccaagaaaaataaaaaggaaatgttagaaatccaaagcactgtcttaggaatgagtaattactttgatgggctcatcagtacccatgacatgggtgagtaagggaccagtgagctttattaaaaatgccttgaaatgaatgaaaatgaaaacacaacataccaaaacctgggaggcagacaaagcactgttaggagggaaattcatagccgtaatgcatacattaaaaaaagaagaaatctcaaattaataacccaactttacaccctaaggaactagaaaaagaaaactaacccaaagccagcagaggaaaaaaaataataagaattaaagtggagataaataagatagagaatagaaaaacaatagagaaaatcttcaaaaccaaaagttggtactttgaaaagactaaattgacaaaccttcagctagattgactcagaataaaagaagactcaaatcactaaaattagaaatagtggagacattaacaccaattttaccaaaataaaatgaattatagaagaatgttacaaacatttatatgccaacgaattggataacttgatggaatggacagattcttagaacgcacatctatcaaaagtgactcatgagccaggcgtggtggctcatgcctgtaatcccagcactttgggagaccgaggcaggcagatcacttgagcccaggagattgagaccaacctgggcgacatggcgaaaccccatctctactaaaaactacaaaaattagccagccatggtggtgcgcacctgtaatcccagctgcttgggagactgaggcaggagaattgcttgaacccaggaagtggaagttgcagtgagctgagattgtgccactgcactccagcctgggcaacagagtgagactctgtctcaaaaac

SEQ ID NO: 90 - DNA, 1644 bp, Homo sapiens
ctgacttactaatactaaagaagttgggggagctcgagagccagacggccagacaggcagacccctccagaggcccgccaggtgggcatggtcccccattttctttaaggcagcacctggagtggagagaggccactccctctccagcccccgatgtggacccggggaggggaggctgaggcgtttggccccggcctggccaggagaggcccatccccagggcagtttcaggtgccggctgggccctgaatgtcgaggatagtatatagcccgctcctgggtcctggagctgtggccctttgtactcgtgttgtgtccattgtgtgtgtgcgtggggacagaggcctggaaatgcggaggactatacagagaaggcaggttttgtgaaggccaggcagggttggaggccgggggtgtgagaggagaggcccatagggctgagtggggtcgggtgaggcagaggtcagaaacagaagagctgcagttgctggagctgggctgagaactgggctgcctcctgccatccccccgtctcctccccttctccccttggtgcccccctctgctcagaatctgaagtagttccctcctcagcaatttcatctcttgaacactgactcacaccttttaggcacctactgtgtgcatagcattccaccaggactcatctcccttccttctcagggggtcccgagccccgactagctttgccctaactccttcatcaaaagaccccccgccagcttcccacacctcatacgcagccacatctgccctattctccatgctttccagcttgcctgcccttcctcatctctccctgcctgtgcagacctccacccttctttcctccacccctccatcccccaatgcttgtagaccttccattcattccgtctcatcgtgcgtggtctctgatcgtccatcacctgaccttctccaggactgtcttctcacccttccccactccctggtccccgggagcagctccttctgcccgactcactcacagtgcagggaaaggaggcagggaaaagaccaggattctgtgagttctgaggttgccacacacaaagaagctgtggtttctctgcctcggccactgatgagactaaaactggcttccccttggagacggcagatttcaggctgatccctgcttaagccctctcatccccacgctggtcctggtattgatacaagacccagctggtgacaaagcctccaatcctgggggtccacgagcctgggcctgacattcccagaactaccgccaggtggcgccaggcccccacagtctgtggccgtggtcttagcccccagttccactctggatgggcctgtgacaccccaaagagaagaaggggactctggatagggtccccacatccagggcgtggggagaccattggcatttgggaaccattttccttcgaacggcttccccttgagctgagcattctgcttgctgcagtagacgggtcgccttttgcccataccgaaattttctgaaattaaatcgcacacccccaccatttcctctccctgggatctggaggaacatcatacatagtaggtgaatcgttttgtagagtgaagaatgctaatgtaaagcaaatagtcacccacgttccttgtaaatcc

SEQ ID NO: 91 - DNA, 1926 bp, Homo sapiens
tgcatgaattagccaggggagatgagtgggaagtggctgaggaaaggcatcgggtcgccagggatctctctgttctcttctattctgtcactggttcagctgtttagaaagtgactcattgaacaccataactgaatacatgaaaaaataatgtaaggtcattgccatgccccctttttctttagctgccctttttaaaggttggctgctcttagatactgaatgctataccgaatgtcctgctactaaaatttctaatatgtatctaaattcaaatttttgttgatataattattatctaaaatgaaactatacatcaaaagtttttttttaatttctggctaaactttaaaaattttaagcttgttttaaagagctatgaaaagtatgtaaatttgaatttgtccatgcagagacctttttatgtaaaagttgttttcagaaactatgaagtaaaattgcaagggaggtaaaatgtttgaggactatgtaataatcttgttttctaattctagtttttgttttctttacagctgcaatatttgtgactgaataggaaaataaatgagtttggagacttcaaataagattgatgctgagtttcaaagggagccaccagtaccaaacccaatacttactcataacttctcttccaaaatgtgtaacacagccgtgaaagtgaacattaggaatatgtactaccttagctgttatccctactcttgaaattgtagtgtatttggattatttgtgtattgtacgatgtaaacaatgaatggatgttactgatgccgttagtgcttttttggacttcacctgaggacagatgatgcagctgttgtgtggcgagctatttggaaagacgtctgtgtttttgaaggtttcaatgtacatataacttttgaacaaaccccaaactcttcccataaattatcttttcttctgtatctctgttacaagcgtagtgtgataataccagataataaggaaaacactcataaatatacaaaactttttccagtgtggagtacatttttccaatcacaggaacttcaactgttgtgagaaatgtttatttttgtggcactgtatatgttaagaaattttattttaaaaaatataaaggttaacgtccataataaatacttctctttgaagctaccttatcaagaacgaaaaatcgtatgggaagaatcccctatttatcactgctatattaaaatatatatattttaattatatttgacaggttttgcatctaaattgacctatttattcattcttgattaaatgcactgaaaagtaaagggtctgtttgtgtcatgttcatgaaaatgcggttagagaggtgctattcaagtgattctgaaggcaccccaaggtatatctgtaatttaaagattactgcaaatatctttactttactgtgggtttttagtacatctgttaatttagtgtttctttgtgtgttttgtagactagtgttcttccatccttcaactgagctcaaagtaggttttgttgtaacattgtgattaggatttaaactaattcagagaattgtatcttttactgtacatactgtattctttaagttttaatttgttgtcatactgtctgtgctgatggcttggcttaagattttgatgcataaatgaggtcactgttgatcagtgttgctagtagcttggcagctcttcataaaagcatattgggttggaaaggtgtttgcctatttttcaaattatttaatagatgtatggtaccatttaaaagtggttgtatctgaatttactgtggggataacatacactgtaatggggaaaaattacctaaaaccaatttcaaaatggctttctttgtatttcagtttaaaaacccagtgcatgtacgccctctgagatgcaataaacaccttgaaccaag

SEQ ID NO: 92 - DNA, 598 bp, Homo sapiens
gtcctatgcttgcaaggacctgggggccgacatcatcctggacatggccaccctgaccggggctcagggcattgccacagggaagtaccacgccgcggtgctcaccaacagcgctgagtgggaggccgcctgtgtgaaggcgggcaggaagtgtggggacctggtgcacccgctggtctactgccccgagctgcacttcagcgagttcacctcagctgtggcggacatgaagaactcagtggcggaccgagacaacagccccagctcctgtgctggcctcttcatcgcctcacacatcggcttcgactggcccggagtctgggtccacctggacattgctgcaccggtgcatgctggtgagcgagccacaggcttcggtgtggccctcctgctggcgctcttcggccgtgcctctgaggaccctctgctgaacctggtgtccccactgggctgtgaggtggatgtcgaggagggggacctggggagggactccaagagacgcaggcttgtgtgagcctcctgcctcggccctgacaaacggggatcttttacctcactttgcactgattaattttaagcaattgaaagattgcccttc

SEQ ID NO: 93 - DNA, 3196 bp, Homo sapiens
gactgtctcaaaaaaacagaaaagaggttgtaaaataaggacagtactgtcaagtttacaatttgaaacatgagctattaattattttagtttttcatccagttctaattttattagtgaaatatatgtaatgtggcctaaaaattagatatttcctacctcctaataaaaactaatgaataactttccaatatcctgaagtcaagcattttctctttgaactgaaatatagccttataggaccccaatcctgtaactgaatttcttaggctaaatgtgtttcgcaattcagagtttttcaggaaacactacatattatgaaataaggctaggattactttgggaggtcaaggcggacggatcacctgaggtcaggagttcaagaccagcctggccaaagtagggaaaccccatctctacgaaaaatacaaatattagccatgtgtaatgtcacatgcctgtaatcccagctactcgggaggctgaggcaggagaatcatttgaacccaggagacagaggttgcactgaggtgagattgtgccactgtactccagcctgagcaacagagtgagactccgtctaagaaaataataattaattaattaattaaattaagctcactagcggtctgggccagtaccccataataagaaatgcagtaaaacatttgaatatttaagtgagggaaataaagactattaatagcctcatgtcagagcaggcatttcccaacctaaggaaatctttgttttcaaatattagggtttttttttaattgtggttaaaggattttggacatgctttgtaaattgttagtaaaaggacctattttccacctgtattctaagttatttttttccctctttttgaatttttcaggtcagcccttcataaacccagatgggagtccagttgtgtataatcctcctatgactcaacaaccagttagatcccaagtgcctggacctccacagccacctctgccagccccacctcaacaaccagcagctaatcacattttctcacaggataacctagggtctcagtttagccacatgagtcttgctcgccagccatctgctgatggttcctgaccctccatgccgccatgttccagtccactgtggttcttcagtctccacagcagtctggttatatcatgacagcagcccctccaccacatcctcctccaccgccaccaccaccacctcctcctcctcccctaccacctgggcagccagtccctactgctggatatcctgcctctggtcatcctgtcagccagcctgtgctccagcagccgggatatattcagcagccatcaccacagatgccagcctgttattgcgctccaggccactatcactccagccaacctcagtatcgcccagtcccttctgttcattacaattcacatctaaaccaaccactgccacaacctgcgcagcagacaggtgagttgtgtttcttatgtcataacttctgagccacacttttttccatcttctatttcagtgttgctcttaagatagtacctactcagtctctcaggatctcgaatatgttcatacatatgagtttgcaaaccaatgagattaaaagagtgagcaaatcttagcatcctctggaaaataccacagtgtcacgtctacatgctaaagggttgggagctgtactgggaatatcttaagcagtttgttaagtggctgccatctcttactgccattgagattgaaactgtctttgcagcctgataaatcacctatggtaacagcaaaagagaggcaaggcgaggcaaggtgacttatgaatggctaaccagaagcaaagatcaaaaccacctaacttggattgagaaccctagtctagggatgatattttgatctcttagtaggcatgcctttaaaagaaatgatgtacttagcatattttctgtgttttgcttttcagtttattgattgatagtgaaaagtatttttaaaccaaatacaatctaaggccacttaaatgaaatttattaaaactcagcattgtttttgttttagcactttgcagattttcttcaagcattcagtgaaaacaattttgatctcagtgtataaaactatcttattgattttttaatgaactcatttctctgtatgcttctcacctagatgtgtacttcccagatgtttaataaggtatttattcagccttttataactctaggagttgaagtggaattttatcattggtttctttagagctttcttaactgcttatcactattggaggctccctgactatgtgagtgtgactcactgaggaacccataacctccacctccactgaggctgtttactgctcttgatattgtgtgaaactcgtcagggttaccaccagtttaggagaagcatctctgcactggcccatctgatgaatagtagtcatacttctctttattgttgcggtcttcagtgatcatgattcactaactttctgtgctagatatagttcatgcttagcatagccatgcaggataacttccaggtccttaatctgttacccttaggagttgtctcgttgttagtttacaggttctcccctttttagtatgttactagccttgtattgtacatgtgacaaatgttcttccaaagaacattgaatacaaacattggtcattttagccaagttagaattttagttccaagctacctaaaatttaataacacagtccacgtcaaataatgtaaactagtatatgatataatttcaaaaggtatcaaaagttattctctattcgtgggaacattggttgtggtactgctcattagctttatatacactggtgttttattcagaaacaattttctgaatttttctggacctcaagtaatagaattttcatattgttttttcttgatttttttcttccaaaattataacacagactgtagctgatgccataataaagaaatgtaccttcatgctactcatttaaatatccttgcgtgtgactaattaacttaattcattagtacactctattaataaggcaagcaaaaatcctttgttctgtgtttgtgttagcttactaattttgttcttcaacatggcaaaatttttatccctgtccatggtcaaactgcctataaaatcactttcaatcacaggttgggactagtgtgctagtatgtatgcctctctgcc

SEQ ID NO: 94 - DNA, 2144 bp, Homo sapiens
agacagggaatactttattcaaaacccatcacagaaatggacagcttgggtctgtaacaaagcattcatgttttagagcataggtcagtaattgtatatgagagcatacactgctacatacaaattaactgatcagaccacaacttttcaatgtttaaaacagaataagcttccctgtaaaagcagcacctttgtgacgttttaactttagtattcctctccttcttcctcaccctctccttcaacagaatccacaccaacctcctcataatccttcctcgcagcacatgaatcacaggtattcctactgcaagcgggaggcggaggagcgggaagcggcggagcgcgaggcgcgcgagaaagggcacttggaacccaccgagctgctgatgaaccgggcttacttgcagagcattacccctcaggggtactctgactcggaggagagggagagtatgccgagggatggcgagagcgagaaggagcacgagaaagaaggcgaggatggctacgggaagctgggcagacaggatggcgacgaggagttcgaggaggaagaggaagaaagtgaaaataaaagtatggatacggatcccgaaacgatacgagatgaagaagagactggagatcactccatggacgatagttcggaggatgggaaaatggaaaccaaatcagaccacgaggaagacaatatggaagatggcatgtaataaactactgcattttaagcttcctatttttttttccagtagtattgttacctgcttgaaaacactgctgtgttaagctgttcatgcacgtgcctgacgcttccaggaagctgtagagagggacagaaggggcggttcagccaagacagatgtagacggagttggagctgggtattgttaaaaactgcattatgcaaaaattttgtacagtgttaaggcctaaaaactgtgtggttcagagactaattcctgtgtttaatagcatttatactttaagcacaactagaaaattgtaagaattgcactctacttatgtatcactacaaactttaaaaaactatgtctaatttatattaatacattttaaaaaggtgcccgcactaccatacatcagtatttttattattattattgttattcctttttaatttaatgtgctcgcactacaatgcatcagtattatgattcctctgtactttcctttcgctattcatcaatttcccattttttttttcagcttaagtaaccacacaattttaggcctcaatttttttttttctgtgaaggaacttgaagtgatgcatgtgtgaatttaagataccgaagtcttaaagtgacctggacgtgaaggaaaaagtaagatgagaaataaagaaagcctttgtaaggtggttttaaaagccttatatgcaaaccttttaatctgtgtttctgcaagtgccatccttgtacagtgttaagagggtaacatgggttacctttgcaccagcttcagtgttaagctcaccctgttctttgaagcacccatgtcagtattagaagaataggcagcagttccttagtttacatatgtttgtgcaattattttctgtacttttttgttcattaattttgtcagtattacaccaaactgtttttgcaacaaaaaaattttttttgcattcatttaattttaggtcaaataacattttatttatgtggctcattttatatttcctaattttatttatttcatactgtagtgtacagtattatagttcttcaatatatagatatattttagtaaaaaaggaacatgacgttgatcatttgggcaaattttacgtaaagagaagagcatttattgtgttttggaacattaattgtgagatgggatttttcaattttattattttatttttgtttttttccaattactggaaattccaaatttgggaacttttgatacgatcttgtgaaaacactgtattttcgactgaaaattccactttcttcatcttgttttttagctaaaaagagggactgttaaatacaatgtatgataccatgacaaaaatctttcctgaattgtctttgtaaaagtattattgaattttcaatttgtaatttcttttgaaaatgaccatgctcgaataaaaatgtagccaaact

SEQ ID NO: 95 - DNA, 420 bp, Homo sapiens
gggccagctaatgaagccaaagaagacagaaatcacagaattcgaccttgaagctgaagagtatgtccccttgccaaaaggggatgtgcacaaaaagaaagaaatcatccaagatgtgaccttgcatgacttggatgtggctaatgcgcggccccaggggggacaagatatcctgtcctgggtccagcctgtgggcgcttgcccctgggcttggggctgccgtccccactcaggcgtggtctgcagcgctgtcagttcagtgtggaaagcatttctttttaagttatcgtaactgttcctgtggttgctttgaaagaatccttccttacctggtgtgttttctataaatcttcataggttattttgattctctctctctctctctctaagttttttaaaaataaacttttcagaacagtt

SEQ ID NO: 96 - DNA, 1026 bp, Homo sapiens
cccttggtcacttggtgccatgagtcctctgacctccctgtttccattctctgagcccttcctgctttcactcgtccatctccaggtggctcctaggctgtctctgcagccattgtcctcaacttttccctaggtcctcctttcctcacgccctcctggccagaaaaccacaaaacctcagatctagccagtagcttggctttgcctgccttcccccaaccccagctgcaccaggcgcacatgcgaccccttatccatgcctccagcctctgtcttacctccaggcagcattcgcccggttagccacccttctagaaactctcttcttgcttctaggctctgtgtcctcctggtttcctccaacctctctggtcctgtttcatttgctgtgggttccttttgcctttgccacccctcaaatggggcttctcactcacactagtgagttttcagtgcttgcagacccaacaccctctttttataacaaatattttttaatacgtccttttccacactgagctgaaattcaagggtaatatatcttcctacacacataatttgtaaaaaatcaatttaacgccataattgcaatatgaaggggaaaaagcagggaagtgacttccaataaaataatattatggcaatacacaaatgcctgggtgtggctatgccagaagacagaatgcgacagtcggcgcctgcttagaatgagtaagtggcatgatgagaagtaagatcatttaacagaattatgttgccacttgatatctgacacatcgaaatagttgacaaatgagtatgtttgtgcaaatacaagtcactgtgaacgtgatgatttgctaatgcagctggtgcaagggtcttgacttgggtcttgagttcgagtggagttgctgtcagagacagatgatttcccccaacggtgagcagctctcagcaaagttccaaacaaaacaacatccagtcatccctcgattaaaacaagaggtgcatttctggagattttggtttatattataatcatgc

SEQ ID NO: 97 - DNA, 1548 bp, Homo sapiens
agaaattgaccaagcagattatagtgtatttactcagcagccactggaggaagaaatggattcaaaatcttttgatgaaatggaacagagcttacttattctttctgaaaccaaggcttctctagtgagcaccatgagcctttggaaacaacagatgtatacaatagcaaagtttcatttctttaccttgaaacgtgaaagtaaatcagtgagatcagtgttgcttctgcttttaatttttttcacagttcagatttttatgtttttggttcatcactcttttaaaaatgctgtggttcccatcaaacttgttccagacttatattttctaaaacctggagacaaaccacataaatacaaaacaagtctgcttcttcaaaattctgctgactcagatatcagtgatcttattagctttttcacaagccagaacataatggtgacgatgattaatgacagtgactatgtatccgtggctccccatagtgcggctttaaatgtggtgcattcagaaaaggactatgtttttgcagctgttttcaacagtactatggtttattctttacctatattagtgaatatcattagtaactactatctttatcatttaaatgtgactgaaaccatccagatctggagtaccccattctttcaagaaattactgatatagtttttaaaattgagctgtattttcaagcagctttgcttggaatcattgttactgcaatgccaccttactttgccatggaaaatgcagagaatcataagatcaaagcttatactcaacttaaactttcaggtcttttgccatctgcatattggattggacaagctgttgttgatatccccttattttttatcattcttattttgatgctaggaagcttattggcatttcattatggattatatttttatactgtaaagttccttgctgtggttttttgccttattggttatgttccatcagttattctgttcacttatattgcttctttcacctttaagaaaattttaaataccaaagaattttggtcatttatctattctgtggcagcgttggcttgtattgcaatcactgaaataactttctttatgggatacacaattgcaactattcttcattatgccttttgtatcatcattccaatctatccacttctaggttgcctgatttctttcataaagatttcttggaagaatgtacgaaaaaatgtggacacctataatccatgggataggctttcagtagctgttatatcgccttacctgcagtgtgtactgtggattttcctcttacaatactatgagaaaaaatatggaggcagatcaataagaaaagatccctttttcagaaacctttcaacgaagtctaaaaataggaagcttccagaaccaccagacaatgaggatgaagatgaagatgtcaaagctgaaagactaaaggtcaaagagctgatgggttgccagtgttgtgaggagaaaccatccattatggtcagcaatttgcataaagaatatgatgacaagaaagattttcttctttc

SEQ ID NO: 98 - DNA, 3928 bp, Homo sapiens
gtattttttgctttaatgctgacacctctttttaaaaaatcaaaacatgtgggaatagttgaattttttgttactgtggcttttggatttattggccttatgataatcctcatagaaagttttcccaaatcgttagtgtggcttttcagtcctttctgtcactgtacttttgtgattggtattgcacaggtcatgcatttagaagattttaatgaaggtgcttcattttcaaatttgactgcaggcccatatcctctaattattacaattatcatgctcacacttaatagtatattctatgtcctcttggctgtctatcttgatcaagtcattccaggggaatttggcttacggagatcatctttatattttctgaagccttcatattggtcaaagagcaaaagaaattatgaggagttatcagagggcaatgttaatggaaatattagttttagtgaaattattgagccagtttcttcagaatttgtaggaaaagaagccataagaattagtggtattcagaagacatacagaaagaagggtgaaaatgtggaggctttgagaaatttgtcatttgacatatatgagggtcagattactgccttacttggccacagtggaacaggaaagagtacattgatgaatattctttgtggactctgcccaccttctgatgggtttgcatctatatatggacacagagtctcagaaatagatgaaatgtttgaagcaagaaaaatgattggcatttgtccacagttagatatacactttgatgttttgacagtagaagaaaatttatcaattttggcttcaatcaaagggataccagccaacaatataatacaagaagtgcagaaggttttactagatttagacatgcagactatcaaagataaccaagctaaaaaattaagtggtggtcaaaaaagaaagctgtcattaggaattgctgttcttgggaacccaaagatactgctgctagatgaaccaacagctggaatggacccctgttctcgacatattgtatggaatcttttaaaatacagaaaagccaatcgggtgacagtgttcagtactcatttcatggatgaagctgacattcttgcagataggaaagctgtgatatcacaaggaatgctgaaatgtgttggttcttcaatgttcctcaaaagtaaatgggggatcggctaccgcctgagcatgtacatagacaaatattgtgccacagaatctctttcttcactggttaaacaacatatacctggagctactttattacaacagaatgaccaacaacttgtgtatagcttgcctttcaaggacatggacaaattttcaggaattgcttgatagacaaaaggatgttattgatgtttgttttctgccctagacagtcattcaaatttgggtgtcatttcttatggtgtttccatgacgactttggaagacgtatttttaaagctagaagttgaagcagaaattgaccaagcagattatagtgtatttactcagcagccactggaggaagaaatggattcaaaatcttttgatgaaatggaacagagcttacttattctttctgaaaccaaggcttctctagtgagcaccatgagcctttggaaacaacagatgtatacaatagcaaagtttcatttctttaccttgaaacgtgaaagtaaatcagtgagatcagtgttgcttctgcttttaatttttttcacagttcagatttttatgtttttggttcatcactcttttaaaaatgctgtggttcccatcaaacttgttccagacttatattttctaaaacctggagacaaaccacataaatacaaaacaagtctgcttcttcaaaattctgctggtgagagtgtgtgaaggtctgtgaacgagtgttggcatggagcatggggttgaggggtggataaaggtctggattttaaaactatatttaaggtaaaggcatggtctgtctgcatgaaatctaaattatagttcaatacgtatcttattgatgctgaagaatatattacagtaaattttggtttacaaataaatgacagttttggccaaagtgctgggattacaggcgtgagccaccgcacccggtcagctattttctacatgcttcatttgcagtgtaatattggattgtatgagactttgggttttgtgttaatacctacagaaaatgttgatattttctcttagcaggctgtcaaccaggttaggttcaggtcataagtttctacccacattctttgaactgtagttgtcattttagtttatttttcaaaaacttttgcagtacctttttggtctgtcttgtgtgtgccttgcagtgaacagtctggatttggacagtggtctgtctgttagttcagtttctcaagcctttgtcacactaataggattggatttatgtatgtccagcttgggaattattacaggaattaaaaacaactttttagagtgctttcctgagctctctttctatttgttcccccttctactttttgcttccctgtggctgctgtttctatcctccagccagagagctagtgtttattttctccattgtgttacacacttgtgcagctgcaaccaccatatccagggcccaatggtaggaggtagagaagaaaagcaaaagggattggcctcatcctcttacaacgatagttccattgaatagagagaaaggttttcctgcctcagagtgttggctgcactaggcttttgttactgtagtctggccctgttaccatgggattgcttgcatgtggggatacaggagaattcagaaaagaaaaaaagatttgctatttctacattctccctgagcattaagacttcccttgcccattcctcaattcaaagctaaggcttcttctggagctgcctctgtgggcggttcgggagataccaaaggagaaaaagtaccactgttgatatggtggtatttcaaattctggtctaccctatttcacatgccttgtttacttttcagagctgacagattgctgctccatgcattctgtccagtttcctaagagagacagcttggagtatgcttaatccatcttacctgggactgaaacagctgcttattttgccgttaaaaattacatgcagtttactgcgtggctccgggtttgtttgtttgtttttcctctttaataggtttattcagaaaacatgtccactgcaattagggaggtaggagtttggagacagaccagaacacttctactgaagaattacttaattaaatgcagaaccaaaaagagtagtgttcaggaaattctttttccactattttttttattttggttaatattaattagcatgatgcatccaaataagaaatatgaagaagtgcctaatatagaactcaatcctatggacaagtttactctttctaatctaattcttggatatactccagtgactaatattacaagcagcatcatgcagaaagtgtctactgatcatctacctgatgtcataattactgaagaatatacaaatgaaaaagaaatgttaacatccagtctctctaagccgagcaactttgtaggtgtggttttcaaagactccatgtcctatgaacttcgtttttttcctgatatgattccagtatcttctatttatatggattcaagagctggctgttcaaaatcatgtgaggctgctcagtactggtcctcaggtttcacagttttacaagcatccatagatgctgccattatacagttgaagaccaatgtttctctttggaaggagctggagtcaactaaagctgttattatgggagaaactgctgttgtagaaatagatacctttccccgaggagtaattttaatatacctagttatagcattttcaccttttggatactttttggcaattcatatcgtagcag

SEQ ID NO: 99 - DNA, 814 bp, Homo sapiens
tcccgattgaattctagacctgcggccgcaggtctagaattcaatcgggaggatcttgctgtattgcccaggctggtctcagactccttgccttaagcagtcctcccacctcggcctcctaaagtgctgggattacaggcgtgaagcattacatccaagtgaaacttcttgagatggttacataatgtctaaatctgctggtgtagaagttaataaagtgtagaactgaataaatattaaatattagatcaagtttctcatgtttatcttaacgtataacgatttatcttaaagcactgattttcacaaaataacatcagtgtgaaattggaaaagaagccaaatattttatttcatgtatctgggaaatgaggtgctttagtcaactgaatctgcccaaaactaaaaagcattaattaaaaagtacttaactcagaaattataaaaataggagacatcaataaaatacattctacacagaatacgccaaccatacactactcttttttgataataaaaaatgtatttactgagccagttgtggtggctcacgcctgtaatcccagcaccttggaaggccaatgagagtggatcggttgaggccgggagtttgagaccagcctggccaacatggtgagatgccgtctctactaagaatacaaaaatgggccgggcacggtggcacgcacctgtaatcccaggtactccgaaggatgaggcaggataattgtttgaactcaggaggtggaggttgcggtgagccgagatcatgccactgcactccagcctgggtgacagagtgagtctctgtctc

SEQ ID NO: 100 - DNA, 674 bp, Homo sapiens
ggttgggggagtagtggggcacggctcctaagatccagcccccatactgacagacggacagacagacatgcaaacaccagactgaagcacatgtaatatagaccgtgtatgtttacaatgttgtgtataaatgggacaactcctcgccctctacctgtcccctccccctttggttgtatgattttcttcttttttaagaacccctggaagcagcgcctccttcagggttggctgggagctcggcccatccacctcttggggtacctgcctctctctctcctgtggtgtcccttccctctcccatgtgctcggtgttcagtggtgtatatttcttctcccagacatggggcacacgccccaagggacatgatcctctccttagtcttagctcatggggctctttataaggagttggggggtagaggcaggaaatgggaaccgagctgaagcagaggctgagttagggggctagaggacagtgctcctggccacccagcctctgctgagaaccattcctgggattagagctgcctttcccagggaaaaagtgtcgtctccccgaccctcccgtgggccctgtggtgtgatgctgtgtctgtatattctatacaaaggtacttgtcctttccctttgtaaactacatttgacatggattaaaccagtataaacagtt

SEQ ID NO: 101 - DNA, 1081 bp, Homo sapiens
gccacggacgctggctccccaaagggtgtgccctcaccacccacttgatttttttcattttgccaaaaaggggtatgtctttatcaaaggagagtcacagaacaaatgtttgtttgtaaagcgttccaagtattttgccacgttctggactgtcttctccctgcacaagccagggtgtgtctcggtagctgtgcgtggtgtggagtgtgtgtcttacctccctgaagctgtgacggagcgaactggcgcctccgagggacgcggctcccggggcagggcagccgtcacccctgcctcccgcccccttggctgggacgtctggggtcctgtggggcccccacaatggtcccaaacagctgcctctgccactgactgcagggacacgggcagcctggctcccaggacacgacttgtaatgaaagtttggggacatgtgattgattgattgattgattgtaaataaaggatgatggccacaacatgaaaactccatatttatttagatgctattattactgtttggacttttattttggcaggcttttttccagactctagggttttccaatgtgactaatgaccacacctgcctctcccgtcgtctcttctgggcaccctcccacccggctgcatacccggccagggctcccacagagacaaggagggcacaggtgtctgccccctctttaaaatcgatctacacacatccacgcacatgcgaccccgaggaaacgaaacccactctagaaaacgcgaccttggccgcacctaaagcagccagccgtgagtgcagaccccttggccagcgtggcgcagtggccctgagcagtagtggcatgtgtgtagatcaagtcggatctagtccagctcggttcattagcgatccatgtaatctgacgtcatcttgtctcgaagtctctttttttggcccaggccttgaagaatacactgtgacttaagaagccttaccacgcagtaactaaagctttaggatgactgtattcgaggagtgccgtgtgttgcatgcagctacccgtaggaagacttcgcgcatatcactaataaacctgaagtcgtgatg

SEQ ID NO: 102 - DNA, 3334 bp, Homo sapiens
aaaagatccagatggtgctaaaagccaagaaaaagaggaaccagaaatctccacggaaaaagaagactctgcacgtttggatgatcacgaagaggaggaggaagaggatgaagagccatcccacaacgaggaccatgatgccgatgacgaggatgacagccacatggagtctgccgaagtggagaaggaagagctgcccagagaaagcttcaaagaagtactggaaaaccaggagacttttttagaccttaatgtgcagcctggtcactcgaacccagaggtcttaatggactgtggcgtcgacctgacagcttcttgtaacagtgagcccaaggagcttgctggggaccctgaagctgtacccgaatctgacgaggagccacccccaggagaacaggcacagaagcaggaccaaaagaacagcaaggaagtcgatacagagttcaaagagggaaacccagcaaccatggaaatcgactctgagactgtccaggccgttcagtctttgacccaggagagcagcgaacaggacgacacctttcaggattgtgccgagactcaagaggcctgtagaagcctacagaactacacccgtgcagaccaaagtccacagattgccaccacgctcgacgattgccaacagtcggaccacagtagcccagtttcatccgtccactcccatcctggccagtccgtacgttctgtcaacagcccaagtgtccctgctctggaaaacagctacgcccaaatcagcccagatcaaagtgccatctcagtgccatctctgcagaacatggaaaccagtcccatgatggatgtcccatcagtttcagatcattcacagcaagtcgtagacagtggatttagtgacctgggcagtatcgagagcacaactgagaactacgaaaacccaagcagctacgattctactatgggaggcagcatctgtggaaacggctcttcacagaacagctgctcctatagcaacctcacctccagcagtctgacacagagcagctgtgctgtcacccagcagatgtccaacatcagcgggagctgcagcatgctgcagcaaaccagcatcagctcccctccgacctgcagcgtcaagtctcctcaaggctgtgtggtggagaggcctccgagcagcagccagcagctggctcagtgcagcatggctgctaacttcaccccacccatgcagctggctgaaatccccgagacgagcaacgccaacattggcttatacgagcgaatgggtcagagtgattttggggctgggcattacccgcagccgtcagccaccttcagccttgccaaactgcagcagttaactaatacacttattgatcattcattgccttacagccattccgctgctgtgacttcctatgcaaacagtgcctctttgtccacaccattaagtaacacagggcttgttcaactttctcagtctccacactccgtccctgggggaccccaagcacaagctaccatgaccccaccccccaacctgactcctcctccaatgaatctgccgccgcctcttttgcaacggaacatggctgcatcaaatattggcatctctcacagccaaagactgcaaacccagattgccagcaagggccacatctccatgagaaccaagtcagcgtctctgtcaccagccgctgccacccatcagtcacaaatctatgggcgctcccagactgtagccatgcagggtcctgcacggactttaacgatgcaaagaggcatgaacatgagtgtgaacctgatgccagcgccagcctacaatgtcaactctgtgaacatgaacatgaacactctcaacgccatgaatgggtacagcatgtcccagccaatgatgaacagtggctaccacagcaatcatggctatatgaatcaaacgccccaataccctatgcagatgcagatgggcatgatgggcacccagccatatgcccagcagccaatgcagaccccaccccacggtaacatgatgtacacggcccccggacatcacggctacatgaacacaggcatgtccaaacagtctctcaatggctcctacatgagaaggtagacaacgtgggcagtccacaaaacctacggggcatcactattggattgatctgcacaaatacctttgaagagtacgatttcaaaaccagcaattggtgtgaatgcaaaaacatttgttggcaccatttatttaaaaaaaaaaaaagctgtatgcagcagaaagccttatacaagttgtttttctttttttcctttttcttttttttggtaccttcatttctgttacttttatataaaattctctgcaaaggaaggcctctctttggactacaatttggaggcagccacttgttgtgcctgcttctgttaaacaatgtggatatcaagcccccccaaattatctgttttaatattgaacctagagctttttttttcccttccctgtccactccatgtaaatgcctttagcatttcagttattgtatattttgtttaaggtgacacttcagcatgccgctaatgtctttgttagtgacagtgcattttgtagtactgtacaagtgttgtgctaacagtaagccatttcttaagttttttgccttgattagggtgccctaatttgagggttttaaaaaaaaactatatttttgttaattataaaactgtaaagagctataaaagctattcccatttggttagtcaaaagggttttattgctaaatgtttggtgtaaagttgagacccttttccattttggtgacagatttctttggggaaaaaaggcagctttctgttttataaatgcagacttctgtttattgaatgaagcatatctcagtgtttatctgtcaggttttgaaacatttcatatatgtccaaatacttggcaggatttaaaaaaaaaatagtgaatttggtgtaaagttgctattttatggaaatgcctctaactttacattttcattccatctgtagatttttctatctttataaaatattggagttattttttaaggaaaaatagaaaagtagcttgtgaatagctcaaactaagcttacaaatcgcatgtaaaaaagcaaaaaagttatttgtgtctgtttatattgcttccttttttgtagcctttgtacctgtacagggtgacagtaagggccaagcaggagaggcgtaatccttgtataaaataggatccagcgacactcttgtatttatctgttctctttttagtcagtcacttcaaaaaaacaaaaaacaaacaaaaaaaagctgtacattttaacataaaataaattatgatgagccattttt

SEQ ID NO: 103 - DNA, 2391 bp, Homo sapiens
cgtagcgtctcaaggtatgcgttctctcaaaggaaagctatgcatcgctgcttcgttgtctgattttgcttagattttgctttggttaggttgcgttttggggtttgcctttttttgttgtcgcttaaatgcaatttggttgtaaagatttgattcctttgtgttcatctgttccgcttctcagcggtccatctcagcgtctcccttcaggaaccgctgagtgtcctctcttaacatccaagccttttaatgaaatcgtactgaaatctgtatcagctaagagtcctccaatcctggtcccattaactccaagtgcctttttgacagtgacaacagacagtccctcgctttttgttgttgttggttttcttaacccctttaatggaactgcctggattttatacagttattaaaggatgtctcttttgctttaaactgcatgctgccaagtgccatttggggtcagcatcctcgtttcaacacagtgtgctctctagttatcatgtgtaacgtgggttctgtttagcgaagatagactagaggacacgttagagatgcccttccctgctccatccctgtggcaccattatggttttttggctgtttgtatatacggttacgtattaactctggaatcctatgggctcatcttgctcacccaatgtgggagtctggtttgagcaagcgagctgaatgtgactattaaaaaaaatttaaaaaaaaaaaagaaaatcttatgtactatccaaaagtgccagaatgactcttctgtgcattcttcttaaagagctgcttggttatccaaaaatgaaaattcaaaataaactctgaagaaaaggaaaaaaaaaaaaaaaaaaaaaaaaaaaaaggccgattcctgccctgccccgaccgccagcgcgaccatgtcccatcactgggggtacggcaaacacaacggacctgagcactggcataaggacttccccattgccaagggagagcgccagtcccctgttgacatcgacactcatacagccaagtatgacccttccctgaagcccctgtctgtttcctatgatcaagcaacttccctgaggatcctcaacaatggtcatgctttcaacgtggagtttgatgactctcaggacaaagcagtgctcaagggaggacccctggatggcacttacagattgattcagtttcactttcactggggttcacttgatggacaaggttcagagcatactgtggataaaaagaaatatgctgcagaacttcacttggttcactggaacaccaaatatggggattttgggaaagctgtgcagcaacctgatggactggccgttctaggtatttttttgaaggttggcagcgctaaaccgggccttcagaaagttgttgatgtgctggattccattaaaacaaagggcaagagtgctgacttcactaacttcgatcctcgtggcctccttcctgaatccctggattactggacctacccaggctcactgaccacccctcctcttctggaatgtgtgacctggattgtgctcaaggaacccatcagcgtcagcagcgagcaggtgttgaaattccgtaaacttaacttcaatggggagggtgaacccgaagaactgatggtggacaactggcgcccagctcagccactgaagaacaggcaaatcaaagcttccttcaaataagatggtcccatagtctgtatccaaataatgaatcttcgggtgtttccctttagctaagcacagatctaccttggtgatttggaccctggttgctttgtgtctagttttctagacccttcatctcttacttgatagacttactaataaaatgtgaagactagaccaattgtcatgcttgacacaactgctgtggctggttggtgctttgtttatggtagtagtttttctgtaacacagaatataggataagaaataagaataaagtaccttgactttgttcacagcatgtagggtgatgagcactcacaattgttgactaaaatgctgcttttaaaacataggaaagtagaatggttgagtgcaaatccatagcacaagataaattgagctagttaaggcaaatcaggtaaaatagtcatgattctatgtaatgtaaaccagaaaaaataaatgttcatgatttcaagatgttatattaaagaaaaactttaaaaattattatatatttatagcaaagttatcttaaatatgaattctgttgtaatttaatgacttttgaattacagagatataaatgaagtattatctgtaaaaattgttataattagagttgtgatacagagtatatttccattcagacaatatatcataacttaataaatattgtattttagatatattctctaataaaattcagaattct

SEQ ID NO: 104 - DNA, 4116 bp, Homo sapiens
aagatgaagtaaagaaggaaagagagggtctggagaatgacttgaaatctgtgaattttgacatgacaagcaagtttttgacagccctggctcaagatggtgtgataaatgaagaagctctttctgttactgaactagatcgagtctatggaggtcttacaactaaagtccaagaatctctaaagaaacaggagggacttcttaaaaatattcaggtctcacatcaggaattttcaaaaatgaaacaatctaataatgaagctaacttaagagaagaagttttgaagaatttagctactgcatatgacaactttgttgaacttgtagctaatttgaaggaaggcacaaagttttacaatgagttgactgaaatcctggtcaggttccagaacaaatgcagtgatatagtttttgcacggaagacagaaagagatgaactcttaaaggacttgcaacaaagcattgccagagaacctagtgctccttcaattcctacacctgcgtatcagtcctcaccagcaggaggacatgcaccaactcctccaactccagcgccaagaaccatgccgcctactaagccccagcccccagccaggcctccaccacctgtgcttccagcaaatcgagctccttctgctactgctccatctccagtgggggctgggactgctgcgccagctccatcacaaacgcctggctcagctcctcctccacaggcgcagggaccaccctatcccacctatccaggatatcctgggtattgccaaatgcccatgcccatgggctataatccttatgcgtatggccagtataatatgccatatccaccagtgtatcaccagagtcctggacaggctccatacccgggaccccagcagccttcataccccttccctcagcccccacagcagtcttactatccacagcagtaatatgtctgctcagcagctcagctgattcagatcagagggaaagaaataccaaccctgcaataagtgtactaaactctacgctctggttaatgtaatgtactctcctggactgaatgcagtgtataatttctgtctacagctagaagctgtgccccagttccacatttgattacacatgtgagatttgctgctgttgcagtataaacactaggtataataggatttgaaattgcattacagttcataaaaattgaaaatgagaaattaaacctgcaagtgaaacatttgaaacgattatacttttctacataagacatggttgggacatcagatacttacaaagatggtttaagtatggatactagagaaaattaagttttctttctctttggtttattgatttggtttaatttccattatgctattttgcataatcaaggcactgtaaatcttataattttaaaataaattacttaagaacagttgtcattgttatgttttgttattgattctcattactgtctaattttttttctggtattagtctcattttgtatgtatataagttaaacagatactgtttttaagtgcatgaatagtacaagttattatcaaggatgttttacagggaaatcaaaagaatattatcatactttatctttcgtatgctgattagtaaacgatttttgacatttattttagaaagtcctataatgtggaagaaacaaacagttgctaccaaagattcttcaaataaacatacaaataaatgtgtatatttaatgttttattgttagcttctccagaaaattgatgcaaattctggtaataattcttgcattttttccccataacctggttaaaataaatacgccattggcaatacttcataatgtaatggaattgtttggggaacacttactgtaccctctcatcctttttccaccttactgtgttaacttagtgacatttaatgcccaatatgtatgaatagatctaagccatttaattttttttccttaaaagattggagtattttataattcaaggagcatacaaaacaatggttgggaacatatgccaattatggaataggctatgtatttaatattaatctctgccattaggatatctactcactgtataaacctcagtaaaaatagtgaagacatgcatcatggaatgagaaaatgagaaaggaatgagttgtctaacatcacagtgggatctgttttttgtgaggttcatttctgaacacattaggcatatgagcagatttccagtgaatctatttatgtttattttctgagtttcaacgctgaccttttcttgcattattgtttcattttaatgatagtgttacttgtcccactgttgttttcattgagtttggatttatattttaatgttcgaatgaaagtatgattgtaaaagggagtgaattggtttaaaaatatatgtatattttaaactttgttgtgtgtaggaaacatgaaggcatgttaattcaatataaatgacctttgatttcatggaatattaaagttggtttaaagtccaatagttaaaccttagcaaaaatagctttttacttcatcagttgctaagatttaatactttggattcatcaaagtgtgacatgggcttgtttgactttctgtaagtggcatttaagttccacattcttattacttgaggtactttatactaacataagacagtgagagttagaggtattacaagttgctagtttataatgtcttactaatgcagaaacaaggaaaaaagcaaaattggcctgaatattctcttggggaaagagggcaccaaagaaaagggtaagtgcatctgagggccaaaagagatgtataagccttttagcccattccccatgctgggcctgctcacagagccacaggaagatcattcagaaactaggaaaggaggcccccacagctgatcctgccacagcacacctgactcactcggctctgttagtgtaaccttttaaatgtagcaacacaaaccctttccctcttgtcagttcactcatcctttggtttctttttaatcacctgtgtctgggcacagacaatcacaataaatgcagccctttattactgttaaggatcatactgttggtttggagttggaagggtactactctgtgattcaggtgtgttgtacccatatttataattaggctttattatcttcctaaatcaaggaaaggaaatcatccccagaccatttatgctgagctttggaatactattttaaactggattgtacttaaataatgaagctctgcatagaggaactagtcagaagtggggaaaacactgtctaatttttatcagtctggtataaagtattgatctaagagaactctccctgtgccccttggtctttattctcaattaagaaaaacagtcacatgtcacgacaaaccaatcaatctttatgagatattcctgtatccataccccagcttgtttgcaatttataaacctccccttcaaaactaaggagttgcagaaaaaaatggatttcacagagccttgtgtccctaaagttctgtcccagtcagcagtctttatagtccaaacagattataaaaaatgttttccatttgaactttacagtttgcaaaagtgcttttatacattttctaatttcagaaacaggataatttgttaagtgggtttcagtttgctaatagggattttttgtgttttgttttttaattttcagcatctcttgaagaatcttgctacagccaaatggcatctcactttttaaagacgtttgcaattattagttgattcacagtacagaacaaggtataaaggaaaaaaccctgctaggtagtgttataattgctagattaaaaatagactagaacaggttcattttaagatttacttggaagagcaaagaaggaaaaattatatttttaaagaaagagaatattccggctttatttctggtatgaagtttatattttttaaaaaaatcctatattatcacaccagagattttagattcttttctggttagaaacattgctggtagttggattatatttttattgtattcatttatcttagggggaacattgtaaagaaacaaaaaggtccagatgaatgtatgctagaaataaaagttgaaagattcttacttc

SEQ ID NO: 105 - DNA, 1651 bp, Homo sapiens
gggtcgtcatgatccggaccccattgtcggcctctgcccatcgcctgctcctcccaggctcccgcggccgacccccgcgcaacatgcagcccacgggccgcgagggttcccgcgcgctcagccggcggtatctgcggcgtctgctgctcctgctactgctgctgctgctgcggcagcccgtaacccgcgcggagaccacgccgggcgcccccagagccctctccacgctgggctcccccagcctcttcaccacgccgggtgtccccagcgccctcactaccccaggcctcactacgccaggcacccccaaaaccctggaccttcggggtcgcgcgcaggccctgatgcggagtttcccactcgtggacggccacaatgacctgccccaggtcctgagacagcgttacaagaatgtgcttcaggatgttaacctgcgaaatttcagccatggtcagaccagcctggacaggcttagagacggcctcgtgggtgcccagttctggtcagcctccgtctcatgccagtcccaggaccagactgccgtgcgcctcgccctggagcagattgacctcattcaccgcatgtgtgcctcctactctgaactcgagcttgtgacctcagctgaaggtctgaacagctctcaaaagctggcctgcctcattggcgtggagggtggtcactcactggacagcagcctctctgtgctgcgcagtttctatgtgctgggggtgcgctacctgacacttaccttcacctgcagtacaccatgggcagagagttccaccaagttcagacaccacatgtacaccaacgtcagcggattgacaagctttggtgagaaagtagtagaggagttgaaccgcctgggcatgatgatagatttgtcctatgcatcggacaccttgataagaagggtcctggaagtgtctcaggctcctgtgatcttctcccactcagctgccagagctgtgtgtgacaatttgttgaatgttcccgatgatatcctgcagcttctgaagaagaacggtggcatcgtgatggtgacactgtccatgggggtgctgcagtgcaacctgcttgctaacgtgtccactgtggcagatcactttgaccacatcagggcagtcattggatctgagttcatcgggattggtggaaattatgacgggactggccggttccctcaggggctggaggatgtgtccacatacccagtcctgatagaggagttgctgagtcgtagctggagcgaggaagagcttcaaggtgtccttcgtggaaacctgctgcgggtcttcagacaagtggaaaaggtgagagaggagagcagggcgcagagccccgtggaggctgagtttccatatgggcaactgagcacatcctgccactcccaccttgtgcctcagaatggacaccaggctactcatttggaggtgaccaagcagccaaccaatcgggtcccctggaggtcctcaaatgcctccccataccttgttccaggccttgtgggtgctgccaccatcccaaccttcacccagtggctttgctgacacagtcggtccccgcagaggtcactgtggcaaagcctcacaaagccccctctcctagttcattcacaagcatatgctgagaataaacatgttacacatgg

SEQ ID NO: 106 - DNA, 1832 bp, Homo sapiens
agagaatttaggaaccttaggaaatctcctcctttaggaataaagaggaaaaccagtgagaggatgtttcagaaggggtgaaaagacaaaaatgtgttcaagaaaacagtttcttgaaagagatgagatgttgaagaatgagatgttggtgagttatattaaatgccaccaaagaggcaaatttcatagaaactaaggtcaatgactttggaattaagagtttgacagtgatcattgagagagcaatttctatagagtggtgattcttacactttagaatcatctggagggcttgtttaacacagaatactggaccacacccaccctctatcctcctattctgattcagtaagcctgggaaatttgcattcttaacaagttaccaggcaatcctgctgtcgctgatccaggactatacttgaagaatcactgctatagagcaccaaggatagaagagttgttggacaaaaaaaaaaaaaaaaaagcgccaaaaccctggaccttcggggtcgcgcgcaggccctgatgcggagtttcccactcgtggacggccacaatgacctgccccaggtcctgagacagcgttacaagaatgtgcttcaggatgttaacctgcaaaatttcagccatggtcagaccagcctggacaggcttagagacggcctcgtgggtgcccagttctggtcagcctccgtctcatgccagtcccaggaccagactgccgtgcgcctcgccctggagcagattgacctcattcaccgcatgtgtgcctcctactctgaactcgagcttgtgacctcagctgaaggtctgaacagctctcaaaagctggcctgcctcattggcgtggagggtggtcactcactggacagcagcctctctgtgctgcgcagtttctatgtgctgggggtgcgctacctgacacttaccttcacctgcagtacaccatgggcagagagttccaccaagttcagacaccacatgtacaccaacgtcagcggattgacaagctttggtgagaaagtagtagaggagttgaaccgcctgggcatgatgatagatttgtcctatgcatcggacaccttgataagaagggtcctggaagtgtctcaggctcctgtgatcttctcccactcagctgccagagctgtgtgtgacaatttgttgaatgttcccgatgatatcctgcagcttctgaagaagaacggtggcatcgtgatggtgacactgtccatgggggtgctgcagtgcaacctgcttgctaacgtgtccactgtggcagatcactttgaccacatcagggcagtcattggatctgagttcatcgggattggtggaaattatgacgggactggccggttccctcaggggctggaggatgtgtccacatacccagtcctgatagaggagttgctgagtcgtagctggagcgaggaagagcttcaaggtgtccttcgtggaaacctgctgcgggtcttcagacaagtggaaaaggtgagagaggagagcagggcgcagagccccgtggaggctgagtttccatatgggcaattgagcacatcctgccactcccaccttgtgcctcagaatggacaccaggctactcatttggaggtgaccaagcagccaaccaatcgggtcccctggaggtcctcaaatgcctccccataccttgttccaggccttgtgggtgctgccaccatcccaaccttcacccagtggctttgctgacacagtcggtccccgcagaggtcactgtggcaaagcctcacaaagccccctctcctagttcattcacaagcatatgctgagaataaacatgttacacatgg

SEQ ID NO: 107 - DNA, 3089 bp, Homo sapiens
gacctgctgtcctcatccccagcaaacccttggcccggagatgcttccccgctatccacgcctacaagggtgtcctgatggtgggcaatgagacgacctatgaggatgggcatggctcccggaaaaacatcacagacctggtggagggcgccaagaaagccaatggagtcctagaggcgcggcaactcgccatgcgcatatttgaagattacaccgtctcttggtactggattatcataggcctggtcattgccatggcgatgagcctcctgttcatcatcctgcttcgcttcctggctggtattatggtctgggtgatgatcatcatggtgattctggtgctgggctacggaatatttcactgctacatggagtactcccgactgcgtggtgaggccggctctgatgtctctttggtggacctcggctttcagacggatttccgggtgtacctgcacttacggcagacctggttggcctttagtgagtcacagtctcccattcctgcccccacatgaggccttggagggagtggggagcccagccggctcagcctttgccctttgcagtgatcattctgagtatccttgaagtcattatcatcttgctgctcatctttctccggaagagaattctcatcgcgattgcactcatcaaagaagccagcagggctgtgggatacgtcatgtgctccttgctctacccactggtcaccttcttcttgctgtgcctctgcaccgcctactgggccagcactgctgtcttcctgtccacttccaacgaagcggtctataagatctttgatgacagcccctgcccatttactgcgaaaacctgcaacccagagaccttcccctcctccaatgagtcccgccaatgccccaatgcccgttgccagttcgccttctacggtggtgagtcgggctaccaccgggccctgctgggcctgcagatcttcaatgccttcatgttcttctggttggccaacttcgtgctggcgctgggccaggtcacgctggccggggcctttgcctcctactactgggccctgcgcaagccggacgacctgccggccttcccgctcttctctgcctttggccgggcgctcaggtaccacacaggctccctggcctttggcgcgctcatcctggccattgtgcagatcatccgtgtgatactcgagtacctggatcagcggctgaaagctgcagagaacaagtttgccaagtgcctcatgacctgtctcaaatgctgcttctggtgcctggagaagttcatcaaattccttaataggaatgcctacatcatgattgccatctacggcaccaatttctgcacctcggccaggaatgccttcttcctgctcatgagaaacatcatcagagtggctgtcctggataaagttactgacttcctcttcctgttgggcaaacttctgatcgttggtagtgtggggatcctggctttcttcttcttcacccaccgtatcaggatcgtgcaggatacagcaccacccctcaattattactgggttcctatactgacggtgatcgttggctcctacttgattgcacacggtttcttcagcgtctatggcatgtgtgtggacacgctgttcctctgcttctgtgagtgacccctcaccccaaaccttgctgggccccgaatcccttctttccactgggcatcacatcaccctccaacggggcaacacgcttgcctgcccccagcttccccagggcttggctgtccctcgtcctgggtccccagcctgtcttcctggtttccttttgcgcttagaagcagctccgacctcctgtccactggcccaggctgcagcctggacgctgccctggagcccgcccgcgcttcgcagtttctggctttgactggggggaggggatctgtggctgccactaactctggtctctccatctgttttttttgtttgtttttttcttctctcttcctctcctccatgcctgctggcttccctgttcttccctgcctccctctttccctcccttcccgaccaccccattttccccctgccggttcccggggggagcccaggtgaggacctggaaaggaatgacggctctcaggagcgaccctacttcatgtcgcccgagctgagagacatcctgttgaaggggagtgcggaggaggggaagcgggcagaagccgaggagtagagagtgagggagactggcgtgggggccaggtttcctccatgtagactgggggtgcatgaagcgggggggttcctggcctgcgagtgtggggatcctgtgtgtccctcggagcccactacagtctgcccctctctggtcccagtgtgtctgctttctaaccctctgaggcttctctgtgaccctcatccacctaccctgtccttgaggcccctgcccgtgggctcccctcatgcctcctgctctgggacctctctccacagtggaggacctggagaggaatgacggctcggccgagaggccttacttcatgtcttccaccctcaagaaactcttgaacaagaccaacaagaaggcagcggagtcctgaaggccccgtgctccccacctctcaaggagtctcatgccgcagggtgctcagtagctgggtctgttcccccagccccttgggctcacctgaagtcctatcactgccgctctgcccctccccatgagccagatcccaccagtttctggacgtggagagtctggggcatctccttcttatgccaaggggcgcttggagttttcatggctgcccctccagactgcgagaaacaagtaaaaacccattggggcctcttgatgtctgggatggcacgtggcccgacctccacaagctccctcatgcttcctgtcccccgcttacacgacaacgggccagaccacgggaaggacggtgtttgtgtctgagggagctgctggccacagtgaacacccacgtttattcctgcctgctccggccaggactgaaccccttctccacacctgaacagttggctcaagggccaccagaagcatttctttattattattattttttaacctggacatgcattaaagggtctattagctttc

SEQ ID NO: 108 - DNA, 2863 bp, Homo sapiens
ttttctgtcagtccacttcaccaagcctgcccttggacaaggacccgatgcccaaccccaggcctggcaagccctcggccccttccttggcccttggcccatccccaggagcctcgcccagctggagggctgcacccaaagcctcagacctgctgggggcccggggcccagggggaaccttccagggccgagatcttcgaggcggggcccatgcctcctcttcttccttgaaccccatgccaccatcgcagctgcaggtgaggccctgggcccaggatggggcaggcagggtggggtacctggacctacaggtgccgacctttactgtggcactgggcgggaggggggctggctggggcacaggaagtggtttctgggtcccaggcaagtctgtgacttatgcagatgttgcagggccaagaaaatccccacctgccaggcctcagagattggaggctctccccgacctcccaatccctgtctcaggagaggaggaggccgtattgtagtcccatgagcatagctatgtgtccccatccccatgtgacaagagaagaggactggggccaagtaggtgaggtgacagggctgaggccagctctgcaacttattagctgtttgatctttaaaaagttactcgatctccatgagcctcagtttccatacgtgtaaaagggggatgatcatagcatctaccatgtgggcttgcagtgcagagtatttgaattagacacagaacagtgaggatcaggatggcctctcacccacctgcctttctgcccagctgcccacactgcccctagtcatggtggcaccctccggggcacggctgggccccttgccccacttacaggcactcctccaggacaggccacatttcatgcaccaggtatggacggtgaatgggcagggaggagggagcaggtgggagaactgtggggaggggccccgagtcaggctgaaccacagcccacatgtgccccccagctctcaacggtggatgcccacgcccggacccctgtgctgcaggtgcaccccctggagagcccagccatgatcagcctcacaccacccaccaccgccactggggtcttctccctcaaggcccggcctggcctcccacctgggatcaacgtggccagcctggaatgggtgtccagggagccggcactgctctgcaccttcccaaatcccagtgcacccaggaaggacagcaccctttcggctgtgccccagagctcctacccactgctggcaaatggtgtctgcaagtggcccggatgtgagaaggtcttcgaagagccagaggacttcctcaagcactgccaggcggaccatcttctggatgagaagggcagggcacaatgtctcctccagagagagatggtacagtctctggagcagcagctggtgctggagaaggagaagctgagtgccatgcaggcccacctggctgggaaaatggcactgaccaaggcttcatctgtggcatcatccgacaagggctcctgctgcatcgtagctgctggcagccaaggccctgtcgtcccagcctggtctggcccccgggaggcccctgacagcctgtttgctgtccggaggcacctgtggggtagccatggaaacagcacattcccagagttcctccacaacatggactacttcaagttccacaacatgcgaccccctttcacctacgccacgctcatccgctgggccatcctggaggctccagagaagcagcggacactcaatgagatctaccactggttcacacgcatgtttgccttcttcagaaaccatcctgccacctggaagaacgccatccgccacaacctgagtctgcacaagtgctttgtgcgggtggagagcgagaagggggctgtgtggaccgtggatgagctggagttccgcaagaaacggagccagaggcccagcaggtgttccaaccctacacctggcccctgacctcaagatcaaggaaaggaggatggacgaacaggggccaaactggtgggaggcagaggtggtgggggcagggatgataggccctggatgtgcccacagggaccaagaagtgaggtttccactgtcttgcctgccagggcccctgttcccccgctggcagccaccccctcccccatcatatcctttgccccaaggctgctcagaggggccccggtcctggccccagcccccacctccgccccagacacaccccccagtcgagccctgcagccaaacagagccttcacaaccagccacacagagcctgcctcagctgctcgcacagattacttcagggctggaaaagtcacacagacacacaaaatgtcacaatcctgtccctcactcaacacaaaccccaaaacacagagagcctgcctcagtacactcaaacaacctcaaagctgcatcatcacacaatcacacacaagcacagccctgacaacccacacaccccaaggcacgcacccacagccagcctcagggcccacaggggcactgtcaacacaggggtgtgcccagaggcctacacagaagcagcgtcagtaccctcaggatctgaggtcccaacacgtgctcgctcacacacacggcctgttagaattcacctgtgtatctcacgcatatgcacacgcacagccccccagtgggtctcttgagtcccgtgcagacacacacagccacacacactgccttgccaaaaataccccgtgtctcccctgccactcacctcactcccattccctgagccctgatccatgcctcagcttagactgcagaggaactactcatttatttgggatccaaggcccccaacccacagtaccgtccccaataaactgcagccgagctcccc

SEQ ID NO: 109 - DNA, 3880 bp, Homo sapiens
gggaaactcagccacctgtgacaaatttgagtgtctctgttgaaaacctctgcacagtaatatggacatggaatccacccgagggagccagctcaaattgtagtctatggtattttagtcattttggcgacaaacaagataagaaaatagctccggaaactcgtcgttcaatagaagtacccctgaatgagaggatttgtctgcaagtggggtcccagtgtagcaccaatgagagtgagaagcctagcattttggttgaaaaatgcatctcacccccagaaggtgatcctgagtctgctgtgactgagcttcaatgcatttggcacaacctgagctacatgaagtgttcttggctccctggaaggaataccagtcccgacactaactatactctctactattggcacagaagcctggaaaaaattcatcaatgtgaaaacatctttagagaaggccaatactttggttgttcctttgatctgaccaaagtgaaggattccagttttgaacaacacagtgtccaaataatggtcaaggataatgcaggaaaaattaaaccatccttcaatatagtgcctttaacttcccgtgtgaaacctgatcctccacatattaaaaacctctccttccacaatgatgacctatatgtgcaatgggagaatccacagaattttattagcagatgcctattttatgaagtagaagtcaataacagccaaactgagacacataatgttttctacgtccaagaggctaaatgtgagaatccagaatttgagagaaatgtggagaatacatcttgtttcatggtccctggtgttcttcctgatactttgaacacagtcagaataagagtcaaaacaaataagttatgctatgaggatgacaaactctggagtaattggagccaagaaatgagtataggtaagaagcgcaattccacactctacataaccatgttactcattgttccagtcatcgtcgcaggtgcaatcatagtactcctgctttacctaaaaaggctcaagattattatattccctccaattcctgatcctggcaagatttttaaagaaatgtttggagaccagaatgatgatactctgcactggaagaagtacgacatctatgagaagcaaaccaaggaggaaaccgactctgtagtgctgatagaaaacctgaagaaagcctctcagtgatggagataatttatttttaccttcactgtgaccttgagaagattcttcccattctccatttgttatctgggaacttattaaatggaaactgaaactactgcaccatttaaaaacaggcagctcataagagccacaggtctttatgttgagtcgcgcaccgaaaaactaaaaataatgggcgctttggagaagagtgtggagtcattctcattgaattataaaagccagcaggcttcaaactaggggacaaagcaaaaagtgatgatagtggtggagttaatcttatcaagagttgtgacaacttcctgagggatctatacttgctttgtgttctttgtgtcaacatgaacaaattttatttgtaggggaactcatttggggtgcaaatgctaatgtcaaacttgagtcacaaagaacatgtagaaaacaaaatggataaaatctgatatgtattgtttgggatcctattgaaccatgtttgtggctattaaaactcttttaacagtctgggctgggtccggtggctcacgcctgtaatcccagcaatttgggagtccgaggcgggcggatcactcgaggtcaggagttccagaccagcctgaccaaaatggtgaaacctcctctctactaaaactacaaaaattaactgggtgtggtggcgcgtgcctgtaatcccagctactcgggaagctgaggcaggtgaattgtttgaacctgggaggtggaggttgcagtgagcagagatcacaccactgcactctagcctgggtgacagagcaagactctgtctaaaaaacaaaacaaaacaaaacaaaacaaaaaaacctcttaatattctggagtcatcattcccttcgacagcattttcctctgctttgaaagccccagaaatcagtgttggccatgatgacaactacagaaaaaccagaggcagcttctttgccaagacctttcaaagccattttaggctgttaggggcagtggaggtagaatgactccttgggtattagagtttcaaccatgaagtctctaacaatgtattttcttcacctctgctactcaagtagcatttactgtgtctttggtttgtgctaggcccccgggtgtgaagcacagaccccttccaggggtttacagtctatttgagactcctcagttcttgccactttttttttaatctccaccagtcatttttcagaccttttaactcctcaattccaacactgatttccccttttgcattctccctccttcccttccttgtagccttttgactttcattggaaattaggatgtaaatctgctcaggagacctggaggagcagaggataattagcatctcaggttaagtgtgagtaatctgagaaacaatgactaattcttgcatattttgtaacttccatgtgagggttttcagcattgatatttgtgcattttctaaacagagatgaggtggtatcttcacgtagaacattggtattcgcttgagaaaaaaagaatagttgaacctatttctctttctttacaagatgggtccaggattcctcttttctctgccataaatgattaattaaatagcttttgtgtcttacattggtagccagccagccaaggctctgtttatgcttttggggggcatatattgggttccattctcacctatccacacaacatatccgtatatatcccctctactcttacttcccccaaatttaaagaagtatgggaaatgagaggcatttcccccaccccatttctctcctcacacacagactcatattactggtaggaacttgagaactttatttccaagttgttcaaacatttaccaatcatattaatacaatgatgctatttgcaattcctgctcctaggggaggggagataagaaaccctcactctctacaggtttgggtacaagtggcaacctgcttccatggccgtgtagaagcatggtgccctggcttctctgaggaagctggggttcatgacaatggcagatgtaaagttattcttgaagtcagattgaggctgggagacagccgtagtagatgttctactttgttctgctgttctctagaaagaatatttggttttcctgtataggaatgagattaattcctttccaggtattttataattctgggaagcaaaacccatgcctccccctagccatttttactgttatcctatttagatggccatgaagaggatgctgtgaaattcccaacaaacattgatgctgacagtcatgcagtctgggagtggggaagtgatcttttgttcccatcctcttcttttagcagtaaaatagctgagggaaaagggagggaaaaggaagttatgggaatacctgtggtggttgtgatccctaggtcttgggagctcttggaggtgtctgtatcagtggatttcccatcccctgtgggaaattagtaggctcatttactgttttaggtctagcctatgtggattttttcctaacatacctaagcaaacccagtgtcaggatggtaattcttattctttcgttcagttaagtttttcccttcatctgggcactgaagggatatgtgaaacaatgttaacatttttggtagtcttcaaccagggattgtttctgtttaacttcttataggaaagcttgagtaaaataaatattgtctttttgtatgtcaccc

SEQ ID NO: 110 - DNA, 1680 bp, Homo sapiens
tttttttttttttttttcaataggatcccaaacaatacatatcagattttatccattttgttttctacatgttctttgtgactcaagtttgacattagcatttgcaccccaaatgagttcccctacaaataaaatttgttcatgttgacacaaagaacacaaagcaagtatagatccctcaggaagttgtcacaactcttgataagattaactccaccactatcatcactttttgctttgtcccctagtttgaagcctgctggcttttataattcaatgagaatgactccacactcttctccaaagcgcccattatttttagtttttcggtgcgcgactcaacataaagacctgtggctcttatgagctgcctgtttttaaatggtgcagtagtttcagtttccatttaataagttcccagataacaaatggagaatgggaagaatcttctcaaggtcacagtgaaggtaaaaataaattatctccatcactgagaggctttcttcaggttttctatcagcactacagagtcggtttcctccttggtttgcttctcatagatgtcgtacttcttccagtgcagagtatcatcattctggtctccaaacatttctttaaaaatcttgccaggatcaggaattggagggaatataataatcttgagcctttttaggtaaagcaggagtactatgattgcacctgcgacgatgactggaacaatgagtaacatggttatgtagagtgtggaattgcgcttcttacctatactcatttcttggccccaattactccagagtttgtcatcctcatagcataactatttgtttgactcttattctgactgtgtcaaagtatcaggaagaacaccaggaccatgaacaagacgtattctccacatttctctcaaattctggattctcacatttagcctcttggacgtagaaaacattatgtgtctcagtttggctgttattgacttctacttcataaaataggcatctgctaataaaattctgtggattctcccattgcacatataggtcatcattgtggaaggagaggtttttaatatgtggaggatcaggtttcacacgggaagttaaaggcactatattgaaggatggtttaatttttcctgcattatccttgaccattatttggacactgtgttgttcaaaactggaatccttcactttggtcagatcaaaggaacaaccaaagtattggccttctctaaagatgttttcacattgatgaattttttccaggcttctgtgccaatagtagagagtatagttagtgtcgggactggtattccttccagggagccaagaacacttcatgtagctcaggttgtgccaaatgcattgaagctcagtcacagcagactcaggatcaccttctgggggtgagatgcatttttcaaccaaaatgctaggcttctcactctcattggtgctacactgggaccccacttgcagacaaatcctctcattcaggggtacttctattgaacgacgagtttccggagctattttcttatcttgtttgtcgccaaaatgactaaaataccatagactacaatttgagctggctccctcgggtggattccatgtccatattactgtgcagaggttttcaacagagacactcaaatttgtcacaggtggctgagtttcg

SEQ ID NO: 111 - DNA, 1701 bp, Homo sapiens
acaagtttggtgcatgtctgttcttctgtagggagaagctttagcttcattttactaaaaagattcctcgttattgttgttgccaaagagaaacaaaaatgattttgctttccaagcttggtttgtggcgtctccctcgcagagcccttctcgtttcttttttaaactaatcaccatattgtaaatttcagggtttttttttttgtttaagctgactctttgctctaattttggaaaaaaagaaatgtgaagggtcaactccaacgtatgtggttatctgtgaaagttgcacagcgtggcttttcctaaactggtgtttttcccccgcatttggtggattttttattattattcaaaaacataactgagttttttaaaagaggagaaaatttatatctgggttaagtgtttatcatatatatgggtactttgtaatatctaaaaacttagaaacggaaatggaatcctgctcacaaaatcactttaagatcttttcgaagctgttaatttttcttagtgttgtggacactgcagacttgtccagtgctcccacggcctgtacggacactgtggaaggcctccctctgtcggctttttgccatctgtgatatgccataggtgtgacaatccgagcagtggagtcattcagcgggagcactgcgcgctatcccctcacattctctatgtactatgtatgtatgtattattattattgctgccaagagggtctgatggcacgttgtggggtcggggggtggggcggggaagtgctctaacttttcttaaggttttgttgctagcccttcaagtgcactgagctatgtgactcggatggtctttcacacggcacatttggacatttccagaactaccatgagatggtttagacgggaattcatgcaaatgaggggtcaaaaatggtatagtgaccccgtccacgtcctccaagctcacgaccttggagccccgtggagctggactgaggaggaggctgcacagcgggagagcagctggtccagaccagccctgcagcccccactcagccggcagccagatggccccgcaaggcctccagggatggcccctagccacaggccctggctgaggtctctgggtcggtcagtgacatgtaggtaggaagcactgaaaatagtgttcccagagcactttgcaactcccctgggtaagagggacgacacctctggtttttcaataccaattacatggaacttttctgtaatgggtacaatgaagaagtttctaaaaacacacacaaagcacattgggccaactatttagtaagcccggatagacttattgccaaaaacaaaaaatagctttcaaaagaaatttaagttctatgagaaattccttagtcatggtgttgcgtaaatcatattttagctgcacggcattaccccacacagggtggcagaacttgaagggttactgacgtgtaaatgctggtatttgatttcctgtgtgtgttgccctggcattaagggcattttacccttgcagttttactaaaacactgaaaaatattccaagcttcatattaaccctacctgtcaacgtaacgatttcatgaacgttattatattgtcgaattcctactgacaacattataactgtatgggagcttaactttataaggaaatgtattttgacactggtatcttattaaagtattctgatcct

SEQ ID NO: 112 - DNA, 3112 bp, Homo sapiens
ctttttttttttttttaacttccttttttttttttttgagacagggtctcaccttgtcacctaggctgaagtgcagtggcatgatctccgcacattgcagccttgacctcccatgttcaagtgatcctcctgcctcagccccccaaggagctaagaccacgggtggcaccaccacgcccggctaagcaaatatcttttaagaaatctacacagaacatttcctatttagtactcaggtgacaactgcacccagccacctacttaatgctcaacaatgaatctatcaaggagcacaaatggaacacctcaacctgcacagcaccagcagcaggcgctatagggaaagaagctatttttgttagtgagctccaaccagcaagcgaaacctgagtttttgacaggagcacaaaaagcaagcaaggccagcaaagaaaatccggagaagcagctctcatggatctgccgaaccacagatcaggaatttctcttgccagatacatgttcataggctgaattatgtataaagctagttagtgttctggttaaagtcatgttttgctgtctttaaaccactacccatcacaaaggagtcaaaaaaaaaaaagattggggcggggggggaagctacaaaattttgagctagtccttcatgtttaaaaatataaagtagtacattcttaaaaataataacaatggtggtaaacgtaagtactaagtggtgtgtctatgaaaattcttggagtagaggagaaagacctctactcataagctaaaaagctagaagaaatcaaacaccggatttactcagagatttatatctgtaatgatatggtttggctgtgtctgtacccaaatcacactttgaactgtagttcccataatccccatgtatcgtgggagggacccagtaagagataattgaatctgggggtggttacctccatgctgttctcatgatactgagttctcaagagatctgatggtttcataagaggcatttctccctttgctcagcacttcttgttgtcaccatgtgatgaaggacatgtttgtttccccttccactaggattgtaagtttcctgaggcctccagagccatgctgagatgtgagtcaattaaacctctttcctttataaattactcagtctcgggtatgtccttatagcagtgtgacaacaggctaatacatgtaaagcaccaagcacttagaaaacactaaaatgggccagatgcggtggttcacgcctgtaatcccagcactttgggaggccaagagttcaagaccaccctggccaatatggtaaaaccctgctctactaaaaatacaaaaattagctgggtgtggtggtgagtgcttgtaatcctagctacttgggagggtgaggcaaaagaattgcttgaacctgggaggtggaggttgcagtgagccgagatcacgccactacatcccagcctgggtgacacagtgagactccgtctcaaaaaaaaaacaaaaacaaaacaaaaaaaaaaaaaacccaccaaaatggaagccgttgctcacccagtaatgtcctgaagtaactgtgatcacccatctattgtctcaacaatatacacttatttctagacatttagacttattctagtatgtgagttgtgtatatgtctgtctttctccttgagcttcaatacccagactacataataccgcagaaccttgaaagaatgtttcctgaattgaactaaccaggctttcctggagtctagcaaaaaggttttccacaagccttctatggagcttccatgccaacatttgtgagattcataatatctaagccctaatgggaacaagtaaaagaaaagctatattttctcgctgaccaaaagcatttttgtaaggaaaatgcagtctgtcacactattcagatctcaaactaatatctacctataaataaagaatagtatagaactccctcggaagctgacataagggttcaacccactgaaatgcaacaccaatgaggtatgttacagaatttggcagaattgtaccagtcttttatggttccaaggtctgggctaatagaactttaaccaagatttggggttttaggtttcctctttcttatccttcagacatgacatcacttgggcatattttttctatcaattaaactcataaaatatatgatgctaaaaaaaggggccaggcagttttctgactgtctctacagccaaaagaaatagagctgaaacagctgaatccagataattcaaaggagaggtagagggatcaagaagagaaagagggaaagaaagaaaaaagtaaacaaaattcctaatgaacttttaaatcaggcattgaaacgctgtctatacgtcccattagaggaccagataagagctagatcagagcctctaatcaaaggtttcagtgcatactttttgaatggagcaaatgaaaggggaggctggcaacccatcatatgaatggagagtcactattagcctgatttttcttatttttcattatattccatttgtcaaaggcatttgctattgggggggctaattaatcaggacatagccccatgtgaaatgtgtccaaggaaaccatctcactcctgtgacctttaaatggaaatatttctatgttcttcccatattatcccctcttttcaaaaaccaacaaaatcactgccaatgagctgcagtgacaatttcacagactaaccttcagaatagtacataaactgtctctaaacgacttgcagccaggctcatctcttcactgtctcctaaaggaagcatgcggtcttaccactgaacctccgctcagatcactctcctgacttctcccttttcccagccacccctctgggtcttactcattgttgtttcacatccacaccaagtctcgtgaatcactccctaggttctgctgtttactctcacctctacatttccgtattgttagagtttgttacactcacatgacatttcatatatatgctcatgtacacaaacatgtgtacacacaaacatatatatacttaagtcccttgtcagccacaaatcatatacaaatatattatttaatatatctttcccgattgaattctagacct

SEQ ID NO: 113 - DNA, 3096 bp, Homo sapiens
aacttccttttttttttttttgagacagggtctcaccttgtcacctaggctgaagtgcagtggcatgatctccgcacattgcagccttgacctcccatgttcaagtgatcctcctgcctcagccccccaaggagctaagaccacgggtggcaccaccacgcccggctaagcaaatatcttttaagaaatctacacagaacatttcctatttagtactcaggtgacaactgcacccagccacctacttaatgctcaacaatgaatctatcaaggagcacaaatggaacacctcaacctgcacagcaccagcagcaggcgctatagggaaagaagctatttttgttagtgagctccaaccagcaagcgaaacctgagtttttgacaggagcacaaaaagcaagcaaggccagcaaagaaaatccggagaagcagctctcatggatctgccgaaccacagatcaggaatttctcttgccagatacatgttcataggctgaattatgtataaagctagttagtgttctggttaaagtcatgttttgctgtctttaaaccactacccatcacaaaggagtcaaaaaaaaaaaagattggggcggggggggaagctacaaaattttgagctagtccttcatgtttaaaaatataaagtagtacattcttaaaaataataacaatggtggtaaacgtaagtactaagtggtgtgtctatgaaaattcttggagtagaggagaaagacctctactcataagctaaaaagctagaagaaatcaaacaccggatttactcagagatttatatctgtaatgatatggtttggctgtgtctgtacccaaatcacactttgaactgtagttcccataatccccatgtatcgtgggagggacccagtaagagataattgaatctgggggtggttacctccatgctgttctcatgatactgagttctcaagagatctgatggtttcataagaggcatttctccctttgctcagcacttcttgttgtcaccatgtgatgaaggacatgtttgtttccccttccactaggattgtaagtttcctgaggcctccagagccatgctgagatgtgagtcaattaaacctctttcctttataaattactcagtctcgggtatgtccttatagcagtgtgacaacaggctaatacatgtaaagcaccaagcacttagaaaacactaaaatgggccagatgcggtggttcacgcctgtaatcccagcactttgggaggccaagagttcaagaccaccctggccaatatggtaaaaccctgctctactaaaaatacaaaaattagctgggtgtggtggtgagtgcttgtaatcctagctacttgggagggtgaggcaaaagaattgcttgaacctgggaggtggaggttgcagtgagccgagatcacgccactacatcccagcctgggtgacacagtgagactccgtctcaaaaaaaaaacaaaaacaaaacaaaaaaaaaaaaaacccaccaaaatggaagccgttgctcacccagtaatgtcctgaagtaactgtgatcacccatctattgtctcaacaatatacacttatttctagacatttagacttattctagtatgtgagttgtgtatatgtctgtctttctccttgagcttcaatacccagactacataataccgcagaaccttgaaagaatgtttcctgaattgaactaaccaggctttcctggagtctagcaaaaaggttttccacaagccttctatggagcttccatgccaacatttgtgagattcataatatctaagccctaatgggaacaagtaaaagaaaagctatattttctcgctgaccaaaagcatttttgtaaggaaaatgcagtctgtcacactattcagatctcaaactaatatctacctataaataaagaatagtatagaactccctcggaagctgacataagggttcaacccactgaaatgcaacaccaatgaggtatgttacagaatttggcagaattgtaccagtcttttatggttccaaggtctgggctaatagaactttaaccaagatttggggttttaggtttcctctttcttatccttcagacatgacatcacttgggcatattttttctatcaattaaactcataaaatatatgatgctaaaaaaaggggccaggcagttttctgactgtctctacagccaaaagaaatagagctgaaacagctgaatccagataattcaaaggagaggtagagggatcaagaagagaaagagggaaagaaagaaaaaagtaaacaaaattcctaatgaacttttaaatcaggcattgaaacgctgtctatacgtcccattagaggaccagataagagctagatcagagcctctaatcaaaggtttcagtgcatactttttgaatggagcaaatgaaaggggaggctggcaacccatcatatgaatggagagtcactattagcctgatttttcttatttttcattatattccatttgtcaaaggcatttgctattgggggggctaattaatcaggacatagccccatgtgaaatgtgtccaaggaaaccatctcactcctgtgacctttaaatggaaatatttctatgttcttcccatattatcccctcttttcaaaaaccaacaaaatcactgccaatgagctgcagtgacaatttcacagactaaccttcagaatagtacataaactgtctctaaacgacttgcagccaggctcatctcttcactgtctcctaaaggaagcatgcggtcttaccactgaacctccgctcagatcactctcctgacttctcccttttcccagccacccctctgggtcttactcattgttgtttcacatccacaccaagtctcgtgaatcactccctaggttctgctgtttactctcacctctacatttccgtattgttagagtttgttacactcacatgacatttcatatatatgctcatgtacacaaacatgtgtacacacaaacatatatatacttaagtcccttgtcagccacaaatcatatacaaatatattatttaatatatctttcccgattgaattctagacct

SEQ ID NO: 114 - DNA, 2311 bp, Homo sapiens
ggcacctcagcaaccagtagccatgcgcggcttggaggagtcggggcctcggcctacagcgaccccgtgcggctgcgttaagccggctctggagacaggtaacttccaacaccggcggtgccacactctggagaggtttaggcccaggcagcggacttcgttgccgagaggggtgtaaaacgcacgatctggaactgacgtgcgtcattcttttacctacggcgaaggcacgggtcacgtgctgcggagaccacgtgatgtgctttggcgagcgggatgacgtcatctggcttgttccgctttgttataagacttgtactgtctgcgtagtcttggctcagtagctggagcagctacgtgcagcgtaggggcttttctcttaggggtttccttgccatagcgtatgggagatggtgttaggcgggttaggaattaataaatgccatagagaggcatcctgcgctgtaggaatgaggacagagaagggggaaagtttctgggggagaaaatagttttaaattgggcctagaaagacaaggcatgaatttgtttctctttactcacacgttttcatagaggaatatattagctttagaaactggaaagcaaatggaagaaaattaaaataacctgccagagaaagccattgtcaatatcttggtgtctaccttccacgcttgtttctttgcatacacacttggaaagtgaggtactatacgacctgtttagtaacgttaaaataatttaaaaaaaaatcttaacagggcagttaatgttaattataacactttgggccgggcgcagcggctcatgcctgtaatcccagcactttgggaggccgaggtgggcggatcacgaggtcaggagatcgagaccatcctggctaacacggtgaaacctcgtctctactaaaaaatacaaaaaaatcagccgggcgtggtggtgggctcctgtagtcccagctactcgggaggctgaggcaggagaatggcatgaacccgggaggcgggcttgcagtgagccgagatcgcgccactgcactccggcctgggcgacagagcgagactccgtctcaaaaaaaaaaaaaaaagcgtaggccatgaaggcttcatggcctagccttctcatcatgtgcccctctctcgatgtgcactttccagtgtggatatatataggacacctctgtatgaccttcgtattgaccaaaagatttacggagaactgtggaagacaggaatgtttgaacgcatgtctctgcagacagatgaagatgaacacagtattgaaatgcatttgccttatacagctaaagccatggaaagccataaggatgagtttaccattattcctgtactggttggagctctgagtgagtcaaaagaacaggaattcggaaaactcttcagtaaatatctagcggatcctagtaatctctttgtggtttcttctgatttctgccattggggtcaaagttccgttacagttactatgatgaatcccagggggagatttatagatccattgaacatctagataaaatgggtatgagtattatagaacaattagaccctgtatcttttagcaattacttgaagaaataccataatactatatgtggaagacatcccattggggtgttattaaatgctatcacagagctccagaagaatggaatgaatatgagtttttcgtttttgaattatgcccagtcgagccagtgtagaaactggcaagacagttcagtgagttatgcagctggagcactcacggtccactgaagctctgaatcctcagggatgccacctgcacattctcatactctgtccggggtcccagcctagcctttaccacgatactggtcctggtttggggggattctgaaacctcaaactaatagaactttcttctctttttttctagtaggtgtagtccttccttaatttcaactcattaaaaaatgctttatagtttagggcagtggaaggaaggctggcatcaaaatattttgatcaaaaaagatgacaatgtaaaggctcagttgtggcagacagttttttgaaagtaacttgtaaagcatttaccatatcctaaatttgcactctttgcagacttgtgcacatatattccgctttcagaatagttttgcaaattgtacacaaacaaacaaaaaggtggaagctttttaataaagaaattgcatttataaatgatctgtattagaatataataaatctccagttatagtcaattactacccatgttgtacaacagataccttctattttagttgctaataaagggctacacaact

SEQ ID NO: 115 - DNA, 2782 bp, Homo sapiens
ggcggggccaaggccagggcctgactaaacctggagactcgggtggccgaggggcttcataccagctgaagagcgacaagccgctggcagccgcggatctcaccgccgctcaggagatctgttggtaatctgaggatttttattctacgtcgtcttgacagatggaaaacctgaagtaacttcgggctaaccttgtgtttttggaaaattagtagacttggtggtgaagaaactgggaggagtaggatattagctaactttgcatagccacatatagagcgtcgcagctgcattccaccaaagaggaaccaaaaggcctgtggtgttcccagggtacatattcatgccagaagtgaagtgccttggtgaattcgtttcctgaaagtttatcgcatacttgtactgggttagccttatgccagcctggaccatcttggaggcagtgtaggatcatggaagaactttgaattaggtttttagaacttcagccataaaaatgggcagaattttccttgatcatatcggtggtacccgtctgttttcttgtgcaaactgtgatacgatcctgaccaaccgctcagaactcatctccactcgtttcacaggcgccactggcagagcatttctttttaacaaggtagttaacctgcagtacagtgaagttcaagatcgggtcatgctcactggccgccacatggttcgagatgtgagctgcaaaaactgcaatagcaaactgggatggatctatgagtttgccactgaagacagccagcgatataaggaaggccgcgtgatcctggaacgtgctctagttcgagagagtgagggctttgaggagcatgtaccatctgataactcttgaagatacagagagaaatccatcttttcccaggtctccttcactgaaaacaaaaatctacttacatacactgtcaccttagcatcagagtcggattaatgaactgcggaacaagaggttgtgagaatctaagatggaacctttctttctttctttctttttttttaaattttgtattttccatccaacagcagtgtgtagagagaatattatgcagatgccgttaattttttaccctatgtttacatcttgaggcagcagagtctgtctgcagctatgtggtgagctatgtaaggaaaaaaatctgggctgttagagtgaaaaagtgtgttttatgtcaattgtgaaaggaaaatgttaggagtatggtttttaaacttgggcttcattttaaacttttttttttaaacccagttatttcacttgatttgctagcttcagagaagagatccgaatctgtgcccagcgctaaaggctcagtgttagcatggcttgtgctggccggtgtgccatattcttgttggagatgaaccgtagcaccagagcccattcttccttgtcagtcttggcccaaagatgtcaccattcctagttatttgtcaccacataattggtgttgattggaaactttttctgagatgggacagaactgctgggttgtctttttccatgtaacttaagcatagtaatataaataaagtaatagttggatgcttttgaaaaaaaaaaaaaaaaaaagcgtaggccatgaaggccctgcagggagctgcttatgggacaccgcttcctgcgcggcctcttaacgctgctgctgccgccgccacccctgtatacccggcaccgcatgctcggtccagagtccgtcccgcccccaaaacgatcccgcagcaaactcatggcaccgccccgaatcgggacgcacaatggcaccttccactgcgacgaggcactggcatgcgcactgcttcgcctcctgccggagtaccgggatgcagagattgtgcggacccgggatcccgaaaaactcgcttcctgtgacatcgtggtggacgtggggggcgagtacgaccctcggagacaccgatatgaccatcaccagaggtctttcacagagaccatgagctccctgtcccctgggaagccgtggcagaccaagctgagcagtgcgggactcatctatctgcacttcgggcacaagctgctggcccagttgctgggcactagtgaagaggacagcatggtgggcaccctctatgacaagatgtatgagaactttgtggaggaggtggatgctgtggacaatgggatctcccagtgggcagagggggagcctcgatatgcactgaccactaccctgagtgcacgagttgctcgacttaatcctacctggaaccaccccgaccaagacactgaggcagggttcaagcgtgcaatggatctggttcaagaggagtttctgcagagattagatttctaccaacacagctggctgccagcccgggccttggtggaagaggcccttgcccagcgattccaggtggacccaagtggagagattgtggaactggcgaaaggtgcatgtccctggaaggagcatctctaccacctggaatctgggctgtcccctccagtggccatcttctttgttatctacactgaccaggctggacagtggcgaatacagtgtgtgcccaaggagccccactcattccaaagccggctgcccctgccagagccatggcgggtcttcgggacgaggccctggaccaggtcagtgggatccctggctgcatcttcgtccatgcaagcggcttcattggcggtcaccgcacccgagagggtgccttgagcatggcccgtgccaccttggcccagcgctcatacctcccacaaatctcctagtctaataaaaccttccatctc

SEQ ID NO: 116 - DNA, 1266 bp, Homo sapiens
  misc_feature 76: n = a,c,g, or t
gagatgagtgtgcctacttcactgtcaccatcacagacgtctcctcgtggatcgtgtatcccagcggcaaggtgtntgtggcagccgtgcgcctggagcgtgtggtgctgacctgtgagctatgccggccctgggcagaggtgcgctggaccaaggatggagaggaggtggtggagagccccgcgctgctcctgcagaaggaagacactgtccgccgcctggtgctgcccgctgtccagctcgaggactccggcgagtacttgtgtgaaattgacgatgagtcggcctccttcactgtcaccgtcacagagtcttaccaaagtcaggacagttcaaataacaatccggagttatgcgtcctcttgaaaaagccgaagacccggcggctctggtcccgcttccccccatggcgacgaacagctggcactgagtagcagctgcccccatagtttggggcccacattcctctgtcccacctccctgccattgctttttgcctctccccagactgcttcagccgctaacctaacctggcccctgtgggcatttgagtttgcgacccctgtgttaaaccaataaacatgcaaataaatgtacagtgacaaaaaaaaaaaaaaaaaagaggcctactcgtgttcatgggagctcgttttcttttcctctaggcagagaagaggcgatggcggcgatggcatctctcggcgccctggcgctgctcctgctgtccagcctctcccgctgctcagccgaggcctgcctggagccccagatcaccccttcctactacaccacttctgacgctgtcatttccactgagaccgtcttcattgtggagatctccctgacatgcaagaacagggtccagaacatggctctctatgctgacgtcggtggaaaacaattccctgtcactcgaggccaggatgtggggcgttatcaggtgtcctggagcctggaccacaagagcgcccacgcaggcacctatgaggttagattcttcgacgaggagtcctacagcctcctcaggaaggctcagaggaataacgaggacatttccatcatcccgcctctgtttacagtcagcgtggaccatcggggcacttggaacgggccctgggtgtccactgaggtgctggctgcggcgatcggccttgtgatctactacttggccttcagtgcgaagagccacatccaggcctgagggcggcaccccagccctgcccttgcttccttcaataaacatcacaggacctgggactgctccgg

SEQ ID NO: 117 - DNA, 716 bp, Homo sapiens
gcaggaggtggaggagagtgacttcgtggtgctggagaatgaggggccccatcgccgcctggtgctgcccgccacccagccctcagacgggggcgagtttcagtgcgtcgctggagatgagtgtgcctacttcactgtcaccatcacagacgtctcctcgtggatcgtgtatcccagcggcaaggtgtatgtggcagccgtgcgcctggagcgtgtggtgctgacctgtgagctatgccggccctgggcagaggtgcgctggaccaaggatggagaggaggtggtggagagccccgcgctgctcctgcagaaggaagacactgtccgccgcctggtgctgcccgctgtccagctcgaggactccggcgagtacttgtgtgaaattgacgatgagtcggcctccttcactgtcaccgtcacagagtcttaccaaagtcaggacagttcaaataacaatccggagttatgcgtcctcttgaaaaagcggaagacccggcggctctggtcccgcttccccccatggcgacgaacagctggcattgagtagcagctgcccccatagtttggggccaacattcctctgtcccacctccctgccattgctttttgcctctccccagactgcttcagccgctaacctaacctggcccctgtgggcatttgagtttgcgacccctgtgttaaaccaataaacatgcaaataaatgtacagtgac

SEQ ID NO: 118 - DNA, 4598 bp, Homo sapiens
attgaattctagaccagcggccgcattttttttttttttttttttttttttatttgcaaggctataacttttttaatgacagattttcctaaaagaaaccactataacatctgtccaagtactccagagaaaacaaaaaatacataaagattaaaagtctattactttaacagcacattgccaaacacggacaactaggataaatgccaagaaaccttaaaaaataactttaaaagatgcaacgttcaagccattcaaacgcgtaggttccacaaacaacaggaaaacaagtccaagagcagttctacttgtgcatgatggtaactcagactgtacttcatcaaagttcattcaggtgtttcataggcgtctgagcagagtttgttttttcttccttgcttggagatgtgtacacagattagaggagaggaaagtcttccagatgctgatgtaagcacagcaggcttggttccccttgataaagtatgaaggcagatttagttgactcaagctttatcagtttccctagtgaaaagtcttatgcatgctgaaatagacgagttactgaatttgtcatgcgaagtatttacataaagtgaggtcagtaacccgacagaataaaaaaggtagttgttaaattattgtataaccttttacaacttgaataactttgtgggtaagtgacactgacgttcaaactcctcaaacatacattaacaagaaactatttactgcgtgaagaggcacacatcatgtaaaacatacacgtcatgggagggattcctgcatagcaggaaagtcgctaccactacataacaaatggctatgccaacagtcaaagctgccacgaaagggtacaacattagaattcccctaaaatctcaaggagtgtttgcaatagcacagatagatgcctttcggagagtaagtacatgttttgttcagaagggtatttttcactggaaaatctgaacatcatgtaaataaatcaatgttctaactggataagatttaaggcaatgctactcagacctgagggaaaaaaaatccaaaaaagtttgtttttcttctgaatcatgaacaggtcaaaatcaacatcaaaaagcattcttccaagcattcaatgcatctttaggtattatcagcattacaaaatagaatctactttcatactccaaatatgaaatgagaaattgttctgtgctcttccttgagaactgtaaaaaaaaaaaatgcatggcagcttaggtaattaatattaaaacgtaccatgaaaatgaagactactacacctgctgcacacaaaggagccaccctgctgcaatcagtgctccagaatattcgatttctcttatgactgactttggtgcagtgtggaacgatcgtgggttcataaattaactgttgacattaactacagactaacaaatgatgattagacacagtaagttcaaaaattttacattttgctcctgtttggctgctaaagagcagcaatttaaatcgatataaaaacttctgacgacaaagcctgctatacagataaagtacataatcaaaaattaagcagcaattaaatttcttatttaaacttatctggtatagaatatttacacatttgggaagagagatctctgaaaccaccattctctttactcgcctcttgctctctgcccaccccagcccctccaaatctaaatcaagtgccctgaactatatacacctgtactttggctaagccggctagatgtgactccttctacggtcttggtctggaagaaaagacataaagtctcagaagtcatttgcagccttcttttctgaacaacagtgtactgtagtcaatgaatctgtgctttcacagcaagcgggggaaaagggtcctcacacttcactccccaacctgaatggggcaagatcaaatgccatcagctcgttgcaccacaacaggccaccagagaaaagggaaagaaaacgatcaggacaaaggcagcagctatcaacaaaagtttcccaacaaaggaacctctcctccctaggttcccaaggaaataacactccctcctcactctccctcccctagcacacaaaaaaattaattcacatcacgagaactggtactctggttaagtgtcaggtaagtttaagaaagagaaaatccgtcactttttacactttaactgagacataaaactaacagaacacacaacatcactgtgaaagtaacttcctaaaacagatccagtctacagagtgcaaccaggaaaacttaaaggaatatagtttgttcacaatctgccgtgtacaggatatttatattctttctatgccatataaatagcatttatatagcttacacattcagagacatgcactgggacttttaggtagtacaaatttcttcacaatcacatgtgcaaattttacaaatcactaagtgagtattagtaagcttaggctggaccatgtctcgtattatctaacaaatttagcgggggttcagaatcatccattggaagaaccaggcgtgttcctcgaatgaccagttcatggtccccaaatgcaagctcccgatccaaggcatcttcagaactgtttcccataaatctccttggggcgctggatgtggccggttcagtgttcacagtagaatctccatatgtcaaactgatgtcaccatcattgagaataagatcagaatcatcatctttcaactgttcctggttttcgtaagcctgggggctggtgaggcacctggcgatgggtccacagcaggcagggagtgttgttgtcagcggaggcccgctgtgggtcagcagaggcttcagatagttatgatcaaagttgtaccacatccggaaaagccaagcactctctgctttggtagttctcctttcattttcaggaacacccaagtgttcttggtctgaatcaacaccaaccctgatatgcaagcatgacagcattgcagtggtgccaccaccaaatacccacacggtaaaaaacacaatcagaagcgtggtgctgaacatcatttgccgtgcataagtggcagtatctcgaatggccaaggcaaatgccattgcaccacgaaggccagcaaacatcatcatgtgttgaaaatttgatccaatcttacttcttctacccaaattaagtaagagggacaaggggtaaatattggcagctcttcccaagaaaatagcaacaaatgctcctactacaaatgttgggttaaagacatggttctggaaggtgaacagtgtcagccccatgtaggagaagatgaaattctctgccaagaaattgagaagctcaaacaactgtttagttctatgctgagactccgtggacaaattattatacgtataatgtgcttgtgtgatgccacaaaacaatactgcaactacacctgtgaagccccatgcttcagccaagaggaaggtactccaggacatcaagaagaacaggcctgtctccaacaactggaactcccgtaatttggtgaactttgtcactaaagctgtcaccactccagtagcagcacccattgcaaaagatccactgaagattccaaggaagatcccaatagacttgaacatcgctgtgacatcaaaggtgtgactgttgtctccagctggctggtatgccactattgaggaggacagcactatggcaacagcatcattgaggacactttcaccaaaaagaagtgcatagagttcaacatcaacttgaagctcgtggaatatagcaagaacagtcactggatcagttgctgatacaatggcaccaaacagtaggcaatctgtaaagtaaaaatctcctgcaagttgtcccgttaccttcatcagcgttacacagccatacattattgacccaataacgaaacaagaaattgctgttccaagaaaagcgtatgctaggatagacccaagatttcgaaaaaaatgtctccttttcaggctataacctgcataaaatatgataggaggaagtaatatgttgaaaaatacttctggatcaaaagtaacctttctaagcatttcattatcttgaacattattgagttcatgtgaacttatctctcctttcagcatatactcataaaattttccactaacatttaccagtaaggtagttggacttgactgcacttcacagctcagggtcacattatttacatcactcggaacatgaatgccataccgaagcacaaggcccaccaaaagaccataaatcatagccaggccggtttcgtgcaggaagcgggcccggcggtgcttgaagagccagattgtgagaatggtgagggtgagcagcaggatgaagatgagcaggttggcgctgtcctgccggtggctctcctcggcttgcttctcggacacgatctcctcgtccatggctctagcctctccgccgccgccgtccgaagcccctgcccagtcaaagacgcccactgcgaggagcaaccaaaggggccgcatgagcctgcgggctcggggactgctgccgacgccacggcggaggggtgcccgccgccagccgcgccgagccatgtctccccccgcctcccgcccctacctcaccggcggccc

SEQ ID NO: 119 - DNA, 637 bp, Homo sapiens
gtttcctaccttgaaaacttggatgaaatgattgctcttcagaccaaaaacaagctagaaaaaaatgctactgacaatataagcaagcttttcccagcaccatcagagaagagtcatgaagaaacagacagtaccaaggaagaagcagctaagatggaaaaggaatatggaagcttgaaggattccacaaaagatgataactccaacccaggaggaaagacagatgaacccaaaggaaaaacagaagcctatttggaagccatcagaaaaaatattgaatggttgaagaaacatgacaaaaagggaaataaagaagattatgacctttcaaagatgagagacttcatcaataaacaagctgatgcttatgtggagaaaggcatccttgacaaggaagaagccgaggccatcaagcgcatttatagcagcctgtaaaaatggcaaaagatccaggagtctttcaactgtttcagaaaacataatatagcttaaaacacttctaattctgtgattaaaattttttgacccaagggttattagaaagtgctgaatttacagtagttaaccttttacaagtggttaaaacatagctttcttcccgtaaaaactatctgaaagtaaagttgtatgtaagctg

SEQ ID NO: 120 - DNA, 1642 bp, Homo sapiens
gtctcctctctccctccgtactggacggccccggtccatttccgggctccggatatttggtatcgattggggccggggacgcggagcaggtggccgcggcggggcagctgggccgccagcttggtgcctcggggaccgtctcccgctgctttggtcaccagcccctgcccgcccgacccgctccgttctccggcctgcgagccctgccggccggactttgcgccgcgtccggcgctgctgctgcgctcggggccccgctcggcgccggcggtgaccgggaagcccgcgttaaaggggcaaccgggaccctggcccggtatggctgaagtcagcatcgaccagtccaagctgcctggagtcaaggaagtatgccgagattttgctgtcctggaggaccacaccctggctcacagcctgcaggaacaagagattgagcatcatttggcatcgaacgttcagcggaaccgtttggtccagcatgatctccaggtggctaagcagctccaagaggaagatctgaaagcgcaggcccagctccagaagcgttacaaagaccttgaacaacaagactgtgaaattgctcaggaaattcaggagaagctggctattgaggcagagagacgacgcattcaggagaagaaggatgaggacatagctcgccttttgcaagaaaaggagttacaggaagagaaaaagagaaagaaacactttccagagttccctgcaacccgtgcttatgcagatagttactattatgaagatggaggaatgaagccaagagtgacgaaagaagctgtatctactccatcacgaatggcccacagggatcaggaatggtatgatgctgaaattgccagaaaactgcaagaagaagaacttttggctacccaggtggacatgagagccgctcaagtagctcaagatgaagaaatcgctcgacttctaatggctgaagaaaagaaagcttacaaaaaagccaaggagcgggagaaatcatctttggacaaaagaaagcaagaccccgagtggaagccaaaaacagctaaagcagcaaattcaaagtcaaaagagagtgatgaacctcaccattctaagaatgaaaggccagcacggccaccaccacctatcatgacagatggtgaagatgcggattacactcattttacaaaccagcagagttccacacggcatttctcaaaatcagagtcctctcataaaggttttcattacaaacattaaaaacctaggaatctgccttgaaaatggactcactatagcaaatattactgggtgatacagaatgaattctacacttactttttttctcctgtgtttgcattcctgggatttatcctcaagtgcatttctgaccataagtaattttaattcatttcaaatgttttggttattcatgatcacttgggcagtataagaaaatgtagcttctgaatattggccacctctatgctgcatatacttcttgggatatagtatctaagacctttgtaaactgccattttgttaggtatggagtttggtatctagggagtaggccttatttagcaattcaaattttatggagatgaatgatcaaagtgaaacaatgtttggatgcaacgcagaataaaagaatataagaaat

SEQ ID NO: 121 - DNA, 1000 bp, Homo sapiens
gtctgtgaaaactgagtgtggcttttcttgttgaactgatcattcctgctcttcctgcaaataagtcctgcatacggaccctggaactaaaaatggaaaatcagagcatgccccctcccaattttgtatagctttagtgggctctaaagttgcccgtttttagtgtgaaggaaaaaacgttgatttgcagatatcgtgagaatgaaacctcaacaaagatgtttggttcagtgcttcaaagttgggggacactttttccatgttgaacaaatgccaacttctccggttgcttacagcaaatccttctggaacaatcggggctgaaattgagttgcctttgttaggcgattgggccccattcattcttactcgtgcatcaggtcctggtctgtgtcaggcccaggggacacaggtggtcccagctcagaggcccagtgtccactgcagcccctcccacagcctgcccacccctactgcagggaaaaatgcccagggaggagatggtccaactcctgatcagttttgtgtccgatggagcaggccttgctgagtgaagacactggaactagctgggtcctggggtgacttggaggctttgggcctaaaagggcagcctgaacctggagtcttatctcccccaggagccgaaagcactttttcttgatttcccccaggaaatcaagcgctgcttctcagctcctgtggttttagtatttatatatctgtatcttctttgtagaaatttatttatttttgaataagtaatacctgcctggtacaaaatttaaaaggtacgggagggcgcaagctgcaagggaaggcctgctcccatgccgaccccagaggcagccactgttaccaatttcatgtgtattcctttaactctgttttaaagtaagtctctgaaaactgttcatttccttttgtcagtatttgttgctgaaaacctagaaaaacccagaaaagtataatgaaataaaaactacaaatttcacaaccc

SEQ ID NO: 122 - DNA, 1355 bp, Homo sapiens
gtgctctttgaggccgacgctaggggcccggaagggaaactgcgaggcgaaggtgaccggggaccgagcatttcagatctgctcggtagacctggtgcaccaccaccatgttggctgcaaggctggtgtgtctccggacactaccttctagggttttccacccagctttcaccaaggcctcccctgttgtgaagaattccatcacgaagaatcaatggctgttaacacctagcagggaatatgccaccaaaacaagaattgggatccggcgtgggagaactggccaagaactcaaagaggcagcattggaaccatcgatggaaaaaatatttaaaattgatcagatgggaagatggtttgttgctggaggggctgctgttggtcttggagcattgtgctactatggcttgggactgtctaatgagattggagctattgaaaaggctgtaatttggcctcagtatgtcaaggatagaattcattccacctatatgtacttagcagggagtattggtttaacagctttgtctgccatagcaatcagcagaacgcctgttctcatgaacttcatgatgagaggctcttgggtgacaattggtgtgacctttgcagccatggttggagctggaatgctggtacgatcaataccatatgaccagagcccaggcccaaagcatcttgcttggttgctacattctggtgtgatgggtgcagtggtggctcctctgacaatattagggggtcctcttctcatcagagctgcatggtacacagctggcattgtgggaggcctctccactgtggccatgtgtgcgcccagtgaaaagtttctgaacatgggtgcacccctgggagtgggcctgggtctcgtctttgtgtcctcattgggatctatgtttcttccacctaccaccgtggctggtgccactctttactcagtggcaatgtacggtggattagttcttttcagcatgttccttctgtatgatacccagaaagtaatcaagcgtgcagaagtatcaccaatgtatggagttcaaaaatatgatcccattaactcgatgctgagtatctacatggatacattaaatatatttatgcgagttgcaactatgctggcaactggaggcaacagaaagaaatgaagtgactcagcttctggcttctctgctacatcaaatatcttgtttaatggggcagatatgcattaaatagtttgtacaagcagctttcgttgaagtttagaagataagaaacatgtcatcatatttaaatgttccggtaatgtgatgcctcaggtctgcctttttttctggagaataaatgcagtaatcctctcccaaataagcacacac

SEQ ID NO: 123 - DNA, 363 bp, Homo sapiens
ggggttgcaactgccacgcagcaactgccacgcagaaaaaggaggggttgaaaagggagtagcttctgatattcagaagctattggaagagatgctcaaagaagaaaaaattaccataatccaataaagaagaagacctgagatccaggaagcagatgatctgaactgcagagaaagttcaggaaagttccctcattcatgatgatgggaaataacagtaaattctgtacagcagtcttggacaacaaccaatctaaactggcacagtgcagaggcaatcaacagagaacataatattgatagaatgcctgacgcttttgattgtattcacaggaaacataaacaattggaagacagtttatg

SEQ ID NO: 124 - DNA, 3429 bp, Homo sapiens
  misc_feature 3319: n = a,c,g, or t
gtagaaaacctgatacatgaaattcacagtagagcttttgccacacttgggccaataactaacctagatgtaagtttcaatgaattaacttcctttcctacggaaggcctgaatgggctaaatcaactgaaacttgtgggcaacttcaagctgaaagaagccttagcagcaaaagactttgttaacctcaggtctttatcagtaccatatgcttatcagtgctgtgcattttggggttgtgactcttatgcaaatttaaacacagaagataacagcctccaggaccacagtgtggcacaggagaaaggtactgctgatgcagcaaatgtcacaagcactcttgaaaatgaagaacatagtcaaataattatccattgtacaccttcaacaggtgcttttaagccctgtgaatatttactgggaagctggatgattcgtcttactgtgtggttcattttcttggttgcattatttttcaacctgcttgttattttaacaacatttgcatcttgtacatcactgccttcgtccaaattgtttataggctggatttctgtgtctaacttattcatgggaatctatactggcatcctaacttttcttgatgctgtgtcctggggcagattcgctgaatttggcatttggtgggaaactggcagtggctgcaaagtagctgggtttcttgcagttttctcctcagaaagtgccatatttttattaatgctagcaactgtcgaaagaagcttatctgcaaaagatataatgaaaaatgggaagagcaatcatctcaaacagttccgggttgctgcccttttggctttcctaggtgctacagtagcaggctgttttccccttttccatagaggggaatattctgcatcacccctttgtttgccatttcctacaggtgaaacgccatcattaggattcactgtaacgttagtgctattaaactcactagcatttttattaatggccgttatctacactaagctatactgcaacttggaaaaagaggacctctcagaaaactcacaatctagcatgattaagcatgtcgcttggctaatcttcaccaattgcatctttttctgccctgtggcgtttttttcatttgcaccattgatcactgcaatctctatcagccccgaaataatgaagtctgttactctgatattttttccattgcctgcttgcctgaatccagtcctgtatgttttcttcaacccaaagtttaaagaagactggaagttactgaagcgacgtgttaccaagaaaagtggatcagtttcagtttccatcagtagccaaggtggttgtctggaacaggatttctactacgactgtggcatgtactcacatttgcagggcaacctgactgtttgcgactgctgcgaatcgtttcttttaacaaagccagtatcatgcaaacacttgataaaatcacacagctgtcctgcattggcagtggcttcttgccaaagacctgatggctactggtccgactgtggcacacagtgggcccactctgattatgcagatgaagaagattcctttgtctcagacagttctgaccaggtgcaggcctgtggacgagcctgcttctaccagagtagaggattccctttggtgcgctatgcttacaatctaccaagagttaaagactgaactactgtgtgtgtaaccgtttcccccgtcaaccaaaatcagtgtttatagagtgaaccctattctcatctttcatctgggaagcacttctgtaatcactgcctggtgtcacttagaagaaggagaggtggcagtttatttctcaaaccagtcattttcaaagaacaggtgcctaaattataaattggtgaaaaatgcaatgtccaagcaatgtatgatctgtttgaaacaaatatatgacttgaaaaggatcttaggtgtagtagagcaatataatgttagttttttctgatccataagaagcaaatttatacctatttgtgtattaagcacaagataaagaacagctgttaatattttttaaaaatctattttaaaatgtgattttctataactgaagaaaatatcttgctaattttacctaatgtttcatccttaatctcaggacaacttactgcagggccaaaaaagggactgtcccagctagaactgtgagagtatacataggcattactttattatgttttcacttgccatccttgacataagagaactataaattttgtttaagcaatttataaatctaaaacctgaagatgtttttaaaacaatattaacagctgttaggttaaaaaaatagctggacatttgttttcagtcattatacattgctttggtccaatcagtaattttttcttaagtgttttgtgattacactactagaaaaaaagtaaaaggctaattgctgtgtgggtttagtcgatttggctaaactactaactaatgtgggggtttaatagtatctgagggatttggtggcttcatgtaatgttctcattaatgaatacttcctaatatcgttggctctactaatattttccaatttgctgggatgtcacctagcaatagcttggattatatagaaagtaaactgtggtcaatacttgcatttaattagacgaaacggggagtaattatgacacgaagtacttatgtttatttcttagtgagctggattatcttgaacctgtgctattaaatggaaatttccatacatcttccccatactatttttgataaaagagcctattcaatagctcagaggttgaactctggttaaacaagataatatgttattaataaaaatagaagaagaaagaataaagcttagtcctgtgtctttaaaaattaaaaattttacttgattcccatctatgggctttagacctattactgggtggagtcttaaagttataattgttcaatatgttttttgaacagtgtgctaaatcaatagcaaacccactgccatattagttattctgaatatactaaaaaaatccagctagattgcagtttaataattaaactgtacatactgtgcatataatgaatttttatcttatgtaaattatttttagaacacaagttgggaaatgtggcttctgttcatttcgtttaattaaagctacctcctaaactatagtggctgccagtagcagactgttaaattgtggtttatatactttttgcattgtaaatagtctttgtcgtacattgtcagtgtaataaaaacagaatctttgtatatcaaaatcatgtagtttgtataaaatgtgggaaggatttatttacagtgtgttgtaatttngtaaggccaactatttacaagttttaaaaattgctatcatgtatatttacacatctgataaatattaaatcataacttggtaagaaactcctaattaaaaggttttttcc

SEQ ID NO: 125 - DNA, 1129 bp, Homo sapiens
ctggttttccgactgcttatccgacgctcctccctctgtctctgtagctggagaaggtagtttccaggaaagttttccggtttgcaggccgcgcacatcgggcaggggccatcctcggtccccttgctcgttgctcgcagccccgttcggctacaagtgagtttcagggcgtcatggccaggggccaccgcggccagccgggtgtgaggctgcctttcgctgcccgcgcgctccagtggtctctgggtccgccggcgtccgtttcggcctgaacgcagcccctccgcggcgacgagcagtctcgcgccggagctcatggcctcggaggcgccgtccccgccgcggtcgccgccgccgcccacctcccccgagcctgagctggcccagctaaggcggaaggtggagaagttggaacgtgaactgcggagctgcaagcggcaggtgcgggagatcgagaagctgctgcatcacacagaacggctgtaccagaacgcagaaagcaacaaccaggagctccgcacgcaggtggaagaactcagtaaaatactccaacgtgggagaaatgaagataataaaaagtctgatgtagaagtacaaacagagaaccatgctccttggtcaatctcagattatttttatcagacgtactacaatgacgttagtcttccaaataaagtgactgaactgtcagatcaacaagatcaagctatcgaaacttctattttgaattctaaagaccatttacaagtagaaaatgatgcttaccctggtaccgatagaacagaaaatgttaaatatagacaagtggaccattttgcctcaaattcacaggagccagcatctgcattagcaacagaagatacctccttagaaggctcatcattagctgaaagtttgagagctgcagcagaagcggctgtatcacagactggatttagttatgatgaaaatactggactgtattttgaccacagcactggtttctattatgattctgaaaatcaactctattatgatccttccactggaatttattactattgtgatgtggaaagtggtcgttatcagtttcattctcgagtagatttgcaaccttatccgacttctagcacaaaacaaagtttagatt

SEQ ID NO: 126 - DNA, 1988 bp, Homo sapiens
  misc_feature 800: n = a,c,g, or t
atggaatgaaaaaggagttctgtccaacatctcttccatcaccgatctcggcggctttgacccagtttggctcttccttgtggtgggaggagtgatgttcattttgggatttgcagggtgcattggagcgctacgggaaaacactttccttctcaagtttttttctgtgttcctgggaattattttcttcctggagctcactgccggagttctagcatttgttttcaaagactggatcaaagaccagctgtatttctttataaacaacaacatcagagcatatcgggatgacattgatttgcaaaacctcatagacttcacccaggaatattggcagtgctgtggggcttttggagctgatgattggaacctaaatatttacttcaattgcacagattccaatgcaagtcgagagcgatgtggcgttccattctcctgctgcactaaagatcccgcagaagatgtcatcaacactcagtgtggctatgatgccaggcaaaaaccagaagttgaccagcagattgtaatctacacgaaaggctgtgtgccccagtttgagaagtggttgcaggacaatttaaccatcgttgctggtattttcataggcattgcattgctgcagatatttgggatatgcctggcccagaatttggttagcgatatcgaagctgtcagggcgagctggtagaccccctgcaaccgctgctgcaagacactggacagacccagctttcgggaccctcccgcgtgccgaactgatcttcgagctgcatggacctaatcacagatgcagcctgcantctcgcctaatggagctgccattaggggagtgtaaaactgggaaatgctgctcactgacagaattaaaaaaaaaaataaccagtatgaaagtcgttgcgccgtgaatctctactgtagccatgaatttatggacagttagatgcttaccaaaaaaaaaaaagggagggtaggggacccagatgtacttgaatgtgcagaaaatacattcttgtcctcatcttccgtaattggagggctgggagaggcagctttgctcttcaccacaccttggacggaccaccttctttctgttccatggcctgaaggagtgcatctcctcaaagactcagcccctcacctgggagggcagtggtttgtgggcatccctccatgtacattttaggaaacacttgcaactctcatctgaagaagaaaacaactcatctttgggttcagattttgtgatggtattcagcaagtcacttgggcgagcacacttggtctatcctggaaagtctccttataagagaagttgtgtatttcatgtgcaccgagtaagggcattggaagacgtcatgaggctgtattttagcaggactgatcgtttttctaagtagacctgagctttgtttatcagtgaaattcaaggagaaaatgaggttaatgaagaggtatcagttaaatatccccttcttctcaccctgccaaaattagcagttggatttttggaaactctggaatattctgggtcattttgttttgtatgtttgttgtttttcgtcttccaaaggtgaaagctatgatacagttccacttaaattttagtgttttcttactcagctcaagcattaatttttgattaagtcttaatctgcatgacctgtgaatctgaatccatcatctccctttcctgccagcttttctacaaacattgaaatatgttatttggtcagcacttatttcctaggttcacagccttgggaggttgtggcatgtcctcccagtctggctgggaagagaccagctgtaccatccaaatgcttccctggtcttgatgatctcttccagagtcgatctgagtggccttttctgcaccctccccttctttctctttgaatggaattaaacccaatttggaaacaacattgacccagtcaaaagcttctaatggtttctttttcttcctccagttttagtttgcttttatt

SEQ ID NO: 127 - DNA, 1867 bp, Homo sapiens
ctggcttttgaggggcgcgggcagccttctgactgggtcggaggcctgcgggcccgaagcctctgtccctcctgttcttgtccggcgctgcttagcccctccgcgtagtcatcatggatctgattttaaaccgaatggattatctgcaggtgggagtaacatctcagaagactatgaagctaattcctgcctcaagacacagagctacacaaaaggtggttattggagatcatgatggggtagttatgtgctttggcatgaagaaaggagaagcagcagcagtgttcaagactttacccgggccgaagattgcaaggctggaactgggaggggttatcaacacacctcaggagaaaatttttattgctgcagcatctgagattagaggcttcacaaaaagaggaaaacagttcctctcctttgaaacaaacctcactgaaagcattaaagctatgcacatatctggctcagacctctttctcagtgcaagttacatctataaccattattgtgactgcaaagaccaacattattacctttctggggataaaatcaatgatgtgatctgccttccagtggaaagattatctcgtatcacacctgtattggcctgccaggacagagtgctcagagttttacagggatctgatgtgatgtatgcagttgaagttcctggaccccctactgtcttagcactacacaatggaaatggcggtgactctggagaagaccttttgtttgggacatcagacggaaaacttgcgcttatacagattactacatccaaaccagtacgcaagtgggaaattcaaaatgagaaaaagagaggaggtattttgtgtattgacagctttgacattgtgggtgatggggttaaagatttacttgttgggagagatgacggaatggtggaagtgtatagttttgataatgcaaatgaacctgttctacgatttgatcagatgttgtctgaaagcgtcacatctatccagggtggttgtgtaggaaaagacagctatgatgaaatcgtggtgtccacatattcaggctgggttacaggtctgacaacagagcccattcataaggaaagtggaccaggagaagaactaaaaattaatcaggagatgcagaataaaatttcttccttacggaatgagttggaacatttgcagtataaggtattgcaggaaagagagaattatcaacagtcttctcaatcaagcaaagcaaaatcagcagtaccttcctttggtataaatgataaatttacactaaataaagatgatgccagttacagccttatcttagaggtacagactgcaatagataatgtcttaatacagagtgatgttccaatagatttacttgatgtggataaaaattctgctgttgttagctttagcagctgtgattctgagtcaaacgacaacttccttcttgccacttatcggtgccaggcagatactacaaggctggaactcaagattcgctcaattgaaggccagtatggcacactacaagcatatgtgactccaagaattcaacccaaaacctgtcaggtccgccagtaccacatcaaacctctttcactccatcaaagaactcactttattgatcatgacagacccatgaatacactgaccctaacaggccagttcagttttgctgaagttcactcctgggtggttttttgtctgcctgaagttccagaaaaacctccagcaggagaatgtgtgacattttactttcagaacacctttctagatacacaacttgaaagtacctacagaaaaggagagggagtttttaaatctgacaacatttctactatctccatcctaaaagatgtgctttctaaagaagctac

SEQ ID NO: 128 - DNA, 4802 bp, Homo sapiens
ttgtttttttgtttttttttgttgttgttgtttttttaattgcattgggattaggcaacagaagggtctaatgcggccgggatgagacaggagagtttttaggagggtagctgcgttctaagtaagggactctgctggggtaaaagaggcgcaagcgttgcaagaagggagtgcagggggttgagcaggcacctctacaggaaatggatgctgtccaggtgctggtgggcgccccagggctacgtggcgaagcagctcagccggtccaatcagagtgcgtccagggctcgggtttcgcgatctttaagtgactgaggcagatccccacgcggcacctggccatgctctcagctctcccgccgcgggatggtgccttgagtgaatgacccccttggagaacattcttccgcatccctcgcctcaagccagcctcagacagaaaactgaagattcagcagatccagtgcttcctgctcctcttctgcccaggaacacgcttgccttccccaaggcttccagaagctctgaggcaggaggcaccaagttctacctcatgtttggaggatcttgctagctatggccctcgtactcggctccctgttgctgctggggctgtgcgggaactccttttcaggagggcagccttcatccacagatgctcctaaggcttggaattatgaattgcctgcaacaaattatgagacccaagactcccataaagctggacccattggcattctctttgaactagtgctctctggattctccaggggcggcagcacaggaacccggcccatggcccatcgcactgtcggggagccccagcccagccgccccatcatcagggtggctgcactgcaatggtcaggatatcaggctccaggagatccctggagcgtcccttcaccctgtgcaacctgagtactcgcttcctctaaaggaactggaaatgataatcttcccagttacgggctgggctgtaccacatgctacatccagatactttgagaaaattcttacagaaggcatatgaatccaaaattgattatgacaagccagaaactgtaatcttaggtctaaagattgtctactatgaagcagggattattctatgctgtgtcctggggctgctgtttattattctgatgcctctggtggggtatttcttttgtatgtgtcgttgctgtaacaaatgtggtggagaaatgcaccagcgacagaaggaaaatgggcccttcctgaggaaatgctttgcaatctccctgttggtgatttgtataataataagcattggcatcttctatggttttgtggcaaatcaccaggtaagaacccggatcaaaaggagtcggaaactggcagatagcaatttcaaggacttgcgaactctcttgaatgaaactccagagcaaatcaaatatatattggcccagtacaacactaccaaggacaaggcgttcacagatctgaacagtatccattcagtgctaggaggcggaattcttgaccgactgagacccaacatcatccctgttcttgatgagattaagtccatggcaacagcaatcaaggagaccaaagaggcgttggagaacatgaacagcaccttgaagagcttgcaccaacaaagtacacagcttagcagcagtctgaccagcgtgaaaactagcctgcggtcatctctcaatgaccctctgtgcttggtgcatccatcaagtgaaacctgcaacagcatcagattgtctctaagccagctgaatagcaaccctgaactgaggcagcttccacccgtggatgcagaacttgacaacgttaataacgttcttaggacagatttggatggcctggtccaacagggctatcaatcccttaatgatatacctgacagagtacaacgccaaaccacgactgtcgtagcaggtatcaaaagggtcttgaattccattggttcagatatcgacaatgtaactcagcgtcttcctattcaggatatactctcagcattctctgtttatgttaataacactgaaagttacatccacagaaatttacctacattggaagagtatgattcatactggtggctgggtggcctggtcatctgctctctgctgaccctcatcgtgattttttactacctgggcttactgtgtggcgtgtgcggctatgacaggcatgccaccccgaccacccgaggctgtgtctccaacaccggaggcgtcttcctcatggttggagttggattaagtttcctcttttgctggatattgatgatcattgtggttcttacctttgtctttggtgcaaatgtggaaaaactgatctgtgaaccttacacgagcaaggaattattccgggttttggatacaccctacttactaaatgaagactgggaatactatctctctgggaagctatttaataaatcaaaaatgaagctcacttttgaacaagtttacagtgactgcaaaaaaaatagaggcacttacggcactcttcacctgcagaacagcttcaatatcagtgaacatctcaacattaatgagcatactggaagcataagcagtgaattggaaagtctgaaggtaaatcttaatatctttctgttgggtgcagcaggaagaaaaaaccttcaggattttgctgcttgtggaatagacagaatgaattatgacagctacttggctcagactggtaaatcccccgcaggagtgaatcttttatcatttgcatatgatctagaagcaaaagcaaacagtttgcccccaggaaatttgaggaactccctgaaaagagatgcacaaactattaaaacaattcaccagcaacgagtccttcctatagaacaatcactgagcactctataccaaagcgtcaagatacttcaacgcacagggaatggattgttggagagagtaactaggattctagcttctctggattttgctcagaacttcatcacaaacaatacttcctctgttattattgaggaaactaagaagtatgggagaacaataataggatattttgaacattatctgcagtggatcgagttctctatcagtgagaaagtggcatcgtgcaaacctgtggccaccgctctagatactgctgttgatgtctttctgtgtagctacattatcgaccccttgaatttgttttggtttggcataggaaaagctactgtatttttacttccggctctaatttttgcggtaaaactggctaagtactatcgtcgaatggattcggaggacgtgtacgatgattcctctctctcggggacctggcatttcactttatgataactgtttttacactttccattttggctctgtagtctgcccctcattctgtgtctggtgaatgtgtatgccttgtttttcacttcacttatctttcaacatgggtctttcctgagtttgcactgtcagtatccgtgttagagtaaatatttgggggatgtagttgctgagctttcataataattaaaaaaattaattttatctcccttttttgtattttatagtgttgaaactatacccatgaaaaatatggaaaatggtaataatggttatcataaagatcatgtatatggtattcacaatcctgttatgacaagcccatcacaacattgatagctgatgttgaaactgcttgagcatcaggatactcaaagtggaaaggatcacagatttttggtagtttctgggtctacaaggactttccaaatccaggagcaacgccagtggcaacgtagtgactcaggcgggcaccaaggcaacggcaccattggtctctgggtagtgctttaagaatgaacacaatcacgttatagtccatggtccatcactattcaaggatgactccctcccttcctgtctatttttgttttttacttttttacactgagtttctatttagacactacaacatatggggtgtttgttcccattggatgcatttctatcaaaactctatcaaatgtgatggctagattctaacatattgccatgtgtggagtgtgctgaacacacaccagtttacaggaaagatgcattttgtgtacagtaaacggtgtatataccttttgttaccacagagttttttaaacaaatgagtattataggactttcttctaaatgagctaaataagtcaccattgacttcttggtgctgttgaaaataatccattttcactaaaagtgtgtgaaacctacagcatattcttcacgcagagattttcatctattatactttatcaaagattggccatgttccacttggaaatggcatgcaaaagcaatcatagagaaacctgcgtaactccatctgacaaattcaaaagagagagagagatcttgagagagaaatgctgttcgttcaaaagtggagttgttttaacagatgccaattacggtgtacagtttaacagagttttctgttgcattaggataaacattaattggagtgcagctaacatgagtatcatcagactagtatcaagtgttctaaaatgaaatatgagaagatcctgtcacaattcttagatctggtgtccagcatggatgaaacctttgagtttggtccctaaatttgcatgaaagcacaaggtaaatattcatttgcttcaggagtttcatgttggatctgtcattatcaaaagtgatcagcaatgaagaactggtcggacaaaatttaacgttgatgtaatggaattccagatgtaggcattccccccaggtcttttcatgtgcagattgcagttctgattcatttgaataaaaaggaacttggaaaac

SEQ ID NO: 129 - DNA, 2536 bp, Homo sapiens
ttctagacctgcggccgcaggtctagaattcaagacctgcggccgcttttttttttttttttttttttttttttttttttttgattcatagactttatcggcttcttctccaccagcggtttctgcaatgacaaccgcgcctgtacaatacacatggttcactctgttaaagctgcagggcaacgggagggggctgggggtccctgggcaggcatcaaggctaggggtaagcagcagccaagactgggccagtgggtcccagtgtccgacccagagggtggtggcagctggagttccaaggctgttggaaggggtcaggaggaaggctgggaagccaggggctgcagggagaggacagtgcatcagcagtagcagggagggggcagggagcagaagggggcccatggacactgtcagggcaagagggcatgggacacagcacttcttatgtccatagaggatttttgctgcaggaacaagacagatcactgtataaaagggtctgtacaacattacctatgatacaatgttcacatatgatacaaggctctttccctctttgagttttaaaaaataaatgtacaattccagagctttgggtaaaaaatatatacaccctcatagcaggagcagcagctgcttttgctacggctgttgctgtctcttcaaaagggaaagaggtggtgccagaaagaagggtgagtctgtgccaggaaacctcacccagtagctgccaggagcccctgcacccctcaggccttgaggctggtgatgggagagggaggggagtaaaggtaataaaggccttgccagagtccagtggcgcctttacagtctctgccatccccctcccccactttggggctgcctgccccaggtatagggatccaccccaccccagctctatggggaggacaaagggagagtcaaagagagagggacagagaccatgttgttggtgtcagacacatgagccagaagggggatgtcaactccctccttagcagttagatatcccaaaaagcaggagtgtgggcagcagacaaccctagctcctgatactgctctacccgagcccactgcaaggcagggggagggtcctctaggcagctgaggcctgtgtttccctgagcatcttttaccctctcatcagagcccatccctggaccttccagaggcctgagtgggggacttgcaagggctgatgggtaacccctcccacctgctgctactccctgccccaaaaagcaccttggctcacaagcctgggcatgcagggcagcacgaggagctgagcagggagtgtgggggtggagaaagcaccccgcaccatccaggggcagagtagacaagggtagcaccaaacagaaggacccctccccagcacacacaacatccaccctcaattaccagatgcactcctgctccctaaaagaagacacacacacacacacacacacacacacacacacacacacacacggcaacataatattcctgggggtcccagccctgaccaggaagaagctggacaggtggtggagaagaaggctgccaatccctcccacaatcccactctgcaagacagaagggtgagcagcattctttcctgctgcaagaggaagttggaagctccatccccagaacagatctcgatgggaggacatagaggaaggagctttctatcccctttctcagaggggacaggaaccagcaaagtgtagttttggcttgaaggagcaatggggaggggacttcagcaggatgaacagacttatgggtccaggggtaaatccatcgacctctttcccgtggagcaggaagttgctccacgggaaagatgtcagatgttggttgagacatcgtgcaaagtgcttgagtgccaggtgcccaaggatctggcgggtctgactggagcctccactctcactgactgtttgcctccagcttgtaggagagctcgaagaggaggttctggttgtcgatgacctgaaactggcgcacataggccttggtctgcaggtgattgggggatgcctccatgtccaggcaaagggccggctccggtatttgcggatgtcctcactttttcggccactgaatgcagcttctcgatgttcaccaaaccatctacaagggtcttactcccttcgtgcaggaaagtcaggtctttgaggatcagaggcacgaagggaatcacagggggcttcattttggagatcacttctcggtagcttttgtggttcctgcaggggtccgtcaggttctcaaatttgcgaaacaagttcttgaatttccctggcagcttctcccaggtgagtcgaaggcggctgacagcggcgttgtccagccccatgaccacggcgtagaaagacagcaggtcctggttctgcttgcagagggccgcgatcttgatgaacttcttgagcagctgcgcgcgcttgcccggggcctcgcagagcagcacttcggtggccacccagtgcgtgacctcgctgcagcgctgcagcagcagctccaagttggccgtctcccg

SEQ ID NO: 130 - DNA, 3045 bp, Homo sapiens
cgaggcgcgggtggtgccggtggcggcggcgggggagcgcgggacaggaggcttcggggaagatggacccggcgccctcgctgggctgcagcctcaaggatgtgaagtggagctcggtggccgtgccgctcgacctcctggtcagcacttaccggctgccccagatcgcgcgcctggacaacggagagtgcgtagaagggctgcgggaaaatgactatctgctgattcattcctgccgccagtggaccaccatcactgcccacagcttggaggagggtcactatgtcattgggccaaagatagagattccggtacattatgcagggcaattcaagctgctggaacaagaccgagatataaaggagccagtgcaatatttcaacagtgtggaggaggtggctaaggcatttcctgaacgcgtgtacgtcatggaggatatcacattcaacgtgaaggttgcttcaggtgaatgcaatgaagacactgaagtttacaacatcaccctgtgtactggggatgaactcactctaatggggcaggcagaaatcctttatgcaaagacattcaaggaaaagtcacgactcaacacaatcttcaaaaagattgggaagctcaattccatcagcaagctgggaaaaggcaaaatgccgtgcctcatttgtatgaatcaccggaccaacgaaagcattagccttccattccagtgcaagggcagatttagcacccgaagtcccctggaacttcagatgcaagagggcgaacacaccatccgcaacattgtggagaaaaccaggcttcctgtgaatgtgactgtgccaagccctccaccgagaaacccatacgacctccacttcatccgtgaggggcaccgctataagtttgtgaacatccagaccaagacggtggtggtttgctgtgtgctgcgggacaactagatcctccccatgcactttcctttgcacttgactgtccccaagttcagcctcccagaacacctggtgaagggagagagctggcccgaaaccctggtccatcactggctaggtatctgccaagaacagttcgacatcgatgagtattcccgggctgtccgtgatgtgaaaaccgactggaatgaagaatgcaagagccccaagaagggtcggtgctctggccacaaccacgtgccctattcgctcagctacgcccgcgatgagctcacccggtccttccaccgactctcggtctgtgtgtatggcaacaatctccatggcaacagtgaggtgaaccttcatggttgcagggacctggggggagattgggctccctttcctcatgacatcctgccctatcaggactctggagatagtgggagcgactaccttttcccagaagctactgaagaatcagcaggcatcccgggaaagtcagaacttccctacgaagagctgtggctggaggaaggcaagcccagccatcagcctctcactcgctctctgagcgagaagaacagatgtgatcagtttagaggttctgtccgatccaaatgtgcgacttctcctcttcccatccctgggactctgggagcagcagtgaagtcttcagatactgccctacctccacctccagtgcctcccaaatctgaagccgtcagagaagaatgccggctcctgaacgccccacctgttccaccccgaagcgcaaagcctttgtccaccagtccctccatccctcctcgcacagtcaagccagcgcggcaacagactcgctctcccagccccacctagtcctactattcttcagggctacacaacatcgtcactaaaactgacacaaatccttctgaaagcactcctgtttcctgctatccatgtaaccgagtgaaaactgattctgtggacctgaaatccccgtttggaagtccttctgctgaagctgtgtcctctcggctctcatggcctaaccattattcaggagcatcagaaagccagaccaggagtgacttcctgctggatccaagcaggagttatagttaccctagacaaaagacgccaggcacaccaaagagaaactgcccagcaccttttgattttgatggctgtgagctcctggccagccccactagcccagtcactgcagaattcagtagcagcgtctctggttgtcccaagtcagccagctactctctggagagcacagatgtgaaatctcttgcagctggtgtgacaaagcagagtacgtcatgccctgccttaccccccagggctccaaaactagtggaagagaaggtcgcctccgaaacatctcctttgcctctgaaaattgatggtgctgaggaagaccccaagtctgggtcaccagatctctcggaggaccagtattttgttaaaaagggcatgcaggacatcttctctgcctcctaccctttctcatctccgctccatctccagctggcccccagatcctgtggcgacggttccccatggcagccacctgctgacctatcaggactctctatagaggaagtgtccaagtcactacggttcattggtttgtccgaagatgtcatatcattctttgttactgaaaagattgatgggaacctgcttgttcagctaacggaagaaatcctctcagaggatttcaaattgagcaaattgcaggtgaagaagataatgcaattcattaatggctggaggcccaaaatatagccaaataacccccggccagcatggaacaaaactgatcaatgcgtgtgctagaaggggtgggctgggacacaatttcatgtttttgcactaaaaaccttctctgtaaatagggataagagaaactcttactatgcagattacgtttttgaatggtgaacaggctattttgtacatcaataaaaatgctgtacagaacacttggaggtgtgccttgtacgtcactcaacaaacactcagcagctgctaaaagaaaaaaaggcatgtgcagagaaatcattcttacccaagtaggtttatgtgagaaggtatgatatttattacaaaatagccaaagctgaaagacataaaaatcttt

SEQ ID NO: 131 - DNA, 2584 bp, Homo sapiens
  misc_feature 642,655: n = a,c,g, or t
ctcgcgctgtgcaatttctggtctttcgttgcttctggtccaggctaataaagtttttctttctttaattttttttcttctagttttaacgggagaaattaactccccggggccgccgggttgactgcgctgcctgggccggaggtcttctccggccagggagcgctgtgggaaggggctcgagcggccagggccaggcgaggccgggggggcggggggttaggggaccgcggggctactcttgggagcgcccctgtccggctggctgcgcgccggttttaaatagcatctttcggacttgtcttcgcggccccagtccccgacctcggcgctgcctgggctcctgcagcctctccctaagtcttctccaaacgaccacctcacggattccttatggatcgcagctccaagaggaggcaggtgaagcctttggcagcttctctgctggaagctcttgattatgatagttcagatgacagtgattttaaagttggagatgcctcaggactcgctgattcttgagaagagtcaaaactggagctctcaaaaaatggaccatattctgatttgctgcgtttggctgggagataatagtgaggacgctgatgaaaaaattcactgtgacaattgaggcgttgcagnccatgaaggttgntatggagttgatggagagagtgactctattatgagttcagcttctgaaaactccactgaaccttggttttgtgatgcctgtaaatgtggtgtttctcctagctgtgaactgtgtcctaatcaggatggaattttcaaggagacagatgctggaagatgggttcatattgtttgtgccctgtatgttcctggagtagcctttgaagatattgacaaattacgaccagtaacactaacggaaatgaactattccaaatatggtgccaaggagtgtagcttttgtgaagaccctcgctttgctagaactggggtttgcattagctgtgatgcagggatgtgcagagcctatttccatgtgacctgtgctcaaaaggaaggtctgctttcagaggcagcggcggaagaggatatagcagatccattctttgcttattgtaagcaacatgcagataggttagacagaaagtggaagagaaaaaactacttggctctacagtcctattgtaaaatgtctttgcaagagagagagaagcaactatcaccagaagcacaggcaaggatcaatgcccggcttcagcagtatcgtgccaaagcagaactagctcgatctaccagaccccaggcctgggttccaagggaaaaattgcccagaccactcaccagcagtgcttcagctattcgtaaacttatgcggaaagcagaactcatggggatcagtacagatatctttccagtggacaattcagatactagttctagtgtggatggaaggagaaaacataagcaaccagctctcactgcagattttgtgaattattattttgagagaaatatgcgcatgattcaaattcaggaaaatatggctgaacaaaagaatataaaagataaattagagaatgaacaagaaaagcttcatgtagaatataataagctatgtgaatctttagaagaactacaaaacctgaatggaaaacttcgaagtgaaggacaaggaatatgggctttactaggcagaatcacagggcagaagttgaatataccggcaattttgcgagcacccaaggagagaaaaccaagtaaaaaagaaggaggcacacaaaagacatctactcttcctgcagtactttatagttgtgggatttgtaagaagaaccatgatcagcatcttcttttattgtgtgatacctgtaaactacattaccatcttggatgtctggatcctcctcttacaaggatgccaagaaagaccaaaaacagttattggcagtgctcggaatgtgaccaggcagggagcagtgacatggaagcagatatggccatggaaaccctaccagatggaaccaaacgatcaaggaggcagattaaggaaccagtgaaatttgttccacaggatgtgccaccagaacccaagaagattccgataagaaacacgagaaccagaggacgaaaacgaagcttcgttcctgaggaagaaaaacatgaggaaagagttcctagagagagaagacaaagacagtctgtgttgcaaaagaagcccaaggctgaagatttaagaactgaatgtgcaacttgcaagggaactggagacaatgaaaatcttgtcaggtgtgatgaatgcagactctgctaccattttggctgtttggatcctcctttgaaaaagtctcctaaacagacaggctacggatggatatgtcaggaatgtgattcttcatcttccaaggaagatgaaaatgaagctgaaagaaaaaatatatctcaggagctcaacatggaacagaaaaatccaaagaaataaaagattttctgtagtgtttttgaaaagtttgcagcttatgtaatagcagataaaatttctaattgtaaaatgttaaattgtaaaatctaatttgcaaaatgttctcaataaagtcattcaaaatgaaatagg

SEQ ID NO: 132 - DNA, 2690 bp, Homo sapiens
ggcagatgagaagctagaacttggtgacactgttgtcctaggctctcaaaataaggcttgcaccgttttgttcatgcttttgtattttttcacaatggctggcactgtgtggtgggtgattcttaccattacttggttcttagctgcaggaagaaaatggagttgtgaagccatcgagcaaaaagcagtgtggtttcatgctgttgcatggggaacaccaggtttcctgactgttatgcttcttgctctgaacaaagttgaaggagacaacattagtggagtttgctttgttggcctttatgacctggatgcttctcgctactttgtactcttgccactgtgcctttgtgtgtttgttgggctctctcttcttttagctggcattatttccttaaatcatgttcgacaagtcatacaacatgatggccggaaccaagaaaaactaaagaaatttatgattcgaattggagtcttcagcggcttgtatcttgtgccattagtgacacttctcggatgttacgtctatgagcaagtgaacaggattacctgggagataacttgggtctctgatcattgtcgtcagtaccatatcccatgtccttatcaggcaaaagcaaaagctcgaccagaattggctttatttatgataaaatacctgatgacattaattgttggcatctctgctgtcttctgggttggaagcaaaaagacatgcacagaatgggctgggttttttaaacgaaatcgcaagagagatccaatcagtgaaagtcgaagagtactacaggaatcatgtgagtttttcttaaagcacaattctaaagttaaacacaaaaagaagcactataaaccaagttcacacaagctgaaggtcatttccaaatccatgggaaccagcacaggagctacagcaaatcatggcacttctgcagtagcaattactagccatgattacctaggacaagaaactttgacagaaatccaaacctcaccagaaacatcaatgagagaggtgaaagcggacggagctagcacccccaggttaagagaacaggactgtggtgaacctgcctcgccagcagcatccatctccagactctctggggaacaggtcgacgggaagggccaggcaggcagtgtatctgaaagtgcgcggagtgaaggaaggattagtccaaagagtgatattactgacactggcctggcacagagcaacaatttgcaggtccccagttcttcagaaccaagcagcctcaaaggttccacatctctgcttgttcacccagtttcaggagtgagaaaagagcagggaggtggttgtcattcagatacttgaagaacattttctctcgttactcagaagcaaatttgtgttacactggaagtgacctatgcactgttttgtaagaatcactgttacgttcttcttttgcacttaaagttgcattgcctactgttatactggaaaaaatagagttcaagaataatatgactcatttcacacaaaggttaatgacaacaatatacctgaaaacagaaatgtgcaggttaataatatttttttaatagtgtgggaggacagagttagaggaatcttccttttctatttatgaagattctactcttggtaagagtattttaagatgtactatgctattttacttttttgatataaaatcaagatatttctttgctgaagtatttaaatcttatccttgtatctttttatacatatttgaaaataagcttatatgtatttgaacttttttgaaatcctattcaagtatttttatcatgctattgtgatattttagcactttggtagcttttacactgaatttctaagaaaattgtaaaatagtcttcttttatactgtaaaaaaagatataccaaaaagtcttataataggaatttaactttaaaaacccacttattgataccttaccatctaaaatgtgtgatttttatagtctcgttttaggaatttcacagatctaaattatgtaactgaaataaggtgcttactcaaagagtgtccactattgattgtattatgctgctcactgatccttctgcatatttaaaataaaatgtcctaaagggttagtagacaaaatgttagtcttttgtatattaggccaagtgcaattgacttcccttttttaatgttcatgaccacccattgattgtattataaccacttacagttgcttatattttttgttttaacttttgttttttaacatttagaatattacattttgtattatacagtacctttctcagacattttgtagaattcatttcggcagctcactaggattttgctgaacattaaaaagtgtgatagcgatattagtgccaatcaaatggaaaaaaggtagtcttaataaacaagacacaacgtttttatacaacatactttaaaatattaaggagttttcttaattttgtttcctattaagtattattctttgggcaagattttctgatgcttttgattttctctcaatttagcatttgcttttggtttttttctctatttagcattctgttaaggcacaaaaactatgtactgtatgggaaatgttgtaaatattaccttttccacattttaaacagacaactttgaatacaaaaactttgttttgtgtgatcttttcattaataaaattatctttgtataagg

SEQ ID NO: 133 - DNA, 2146 bp, Homo sapiens
  misc_feature 1525,1575,1605,1720,1725: n = a,c,g, or t
gccgcttttttttttttttttttcagagagtcattactgtttatgggtgagagtaataaaaccagatgaaacaagtacaagttgtttactgaataaacttggttattggcacatctaatctgaggaaaatctgacacaccggacggacctagacagcttctagcatttgagggtaatcttcatttattgtaaatataaggttacctaagaaattgcaattttgtttagactttaataataataaactatgaaaggcatgaattgtttatgtgttacatgagaccacggtttatattgttggttatgaacgtgcaggtatagctgaaaactgagacattttgtgaaaattaaaaatgctgctcttttgtaattttatcgttgcttcatgcattatcggtttagtgatgctgaatcagattgctttattatgggaagatctctctgccagtgtctttattaatggtcaaggtcaattcttctggactgaaattttccacggacagatacaagtcagttgggttagaagagggaactccatataggctctggttttcctaacggtttgcatgactgcattcatgtgcaagctaagttattcctctggtcaatcctctccatcttctggtgtgatctctgtctctttatggaccactactttggtcactgacatgtcagggtgctgctctttggcctctttaattgcctgagccagcgcctggtcatggtcaatgtctgcatcccccgtgatgactattcgcttctcaattcttgtctctgaaatgccccctttcacagttttggtgatgtgcgtaatggtggtggtactggtggtttcagatgtgatcgtctgtgcactcatcagcacgcctggctccagatctgtgcctggatcgacctgtgatgattcatatgtgatggttttggtttcggtgtgaactactggcacttccttcgtggaaatttctagctttactcctcccggtgaaacactgccaaaactgatggtttccgtcttcaccgttgaggactcaaaatgaggtttttgttccaaagtttctgaaatgtggatggctgcactctgctcctcttgtcgctcacgggaagcagcggctgtctcttcctgttccaggacagctttagcgacctcctcccctccttcctctttagccccctccgtctaggcagaaccctctttccctttaatgcctgtgaatgcggctgtgctgcaacatccccgctgtctcccgccgagtaagaagcatccccactcgcgtgcaccacacggcggtcctccaccaacactgtctcatgcacaccttctcactgcaaaccggccggtggtgcaaggtgggtccgtctctattccacaggactccgtcttggtttccattatctgaacccagctttgagaggtagaagtgacccctcctatgaagtactgttaggttttcgcgcagactctaataaactgaagatctcagcgcaatccatgagctcttccccagaagactgattagtctcttangagacaagcggttggatcatgggggcatcctcctgccaggtggccagtcncacgggggagggggcagcctcttctcccantcagtagctacggcaggctctgttgtggtctctaagaaggttctattcagctcgccaacgttggtttgatgtttcatcaggtcatcttgagttttttctagctcctgtgccttgngctcngcatcttcctcctggtccgactcagtggcggtggtctccccgtcggctgcggtgtccgtgcgctcactgtcagtctttccctcgtgccggatggccgagatgggcgtgacttcttcccccttcctccgtttgtcctcttcctcgtcccgctcctcctcagccttcttctccggagtcacagtggtgatcaagttggtctgagagatgccttttgttgtggcgtactggccagtaccaacctctgcagcagacatagaatccttcatgtatatttcatggttttcattcactgatgctccatccaagctgcgagacatggtataacgtttgctggatgagcgttcaaagtaaggtgctgggcgatctatcaacgcactggctcttctcgtttgcgcttgtgtcccgattgaattctagacct

SEQ ID NO: 134 - DNA, 2125 bp, Homo sapiens
aggtctagaattcaatcgggacacaagcgcaaacgagaagagccagtgcgttgatagatcgcccagcaccttactttgaacgctcatccagcaaacgttataccatgtctcgcagcttggatggagcatcagtgaatgaaaaccatgaaatatacatgaaggattctatgtctgctgcagaggttggtactggccagtacgccacaacaaaaggcatctctcagaccaacttgatcaccactgtgactccggagaagaaggctgaggaggagcgggacgaggaagaggacaaacggaggaagggggaagaagtcacgcccatctcggccatccggcacgagggaaagactgacagtgagcgcacggacaccgcagccgacggggagaccaccgccactgagtcggaccaggaggaagatgcagagctcaaggcacaggagctagaaaaaactcaagatgacctgatgaaacatcaaaccaacattagcgagctgaaaagaaccttcttagaaacctcaacagacactgccgtaacgaatgaatgggagaagaggctttccacctcccccgtgcgactggccgccaggcaggaggatgcccccatgatcgaaccacttgtccctgaagagactaagcagtcttctggggaaaagctcatggatggctctgaaatcttcagtttattagagtctgcgcgaaaaccaacagaattcataggaggggttacttctacttctcaaagctgggttcagaaaatggaaaccaagacggagtccagtggaatagagacggaacccaccgtgcaccaccggccgctttgcactgagaaggtgtgcatgagacagtgttggtggaggaccgccgtgtggtgcacgcgagtggggatgcttcttactcggcgggagacagcggggatgctgcagcacagccggcattcacaggcattaaagggaaagagggttctgcctagacggagggggctaaagaggaaggaggggaggaggtcgctaaagctgtcctggaacaggaagagacagccgctgcttcccgtgagcgacaagaggagcagagtgcagccatccacatttcagaaacttttggaacaaaaacctcattttgagtcctcaacggtgaagacggaaaccatcagttttggcagtgtttcaccgggaggagtaaagctagaaatttccacgaaggaagtgccagtagttcacaccgaaaccaaaaccatcacatatgaatcatcacaggtcgatccaggcacagatctggagccaggcgtgctgatgagtgcacagacgatcacatctgaaaccaccagtaccaccaccattacgcacatcaccaaaactgtgaaagggggcatttcagagacaagaattgagaagcgaatagtcatcacgggggatgcagacattgaccatgaccaggcgctggctcaggcaattaaagaggccaaagagcagcaccctgacatgtcagtgaccaaagtagtggtccataaagagacagagatcacaccagaagatggagaggattgaccagaggaataacttagcttgcacatgaatgcagtcatgcaaaccgttaggaaaaccagagcctatatggagttccctcttctaacccaactgacttgtatctgtccgtggaaaatttcagtccagaagaattgaccttgaccattaataaagacactggcagagagatcttcccataataaagcaatctgattcagcatcactaaaccgataatgcatgaagcaacgataaaattacaaaagagcagcatttttaattttcacaaaatgtctcagttttcagctatacctgcacgttcataaccaacaatataaaccgtggtctcatgtaacacataaacaattcatgcctttcatagtttattattattaaagtctaaacaaaattgcaatttcttaggtaaccttatatttacaataaatgaagattaccctcaaatgctagaagctgtctaggtccgtccggtgtgtcagattttcctcagattagatgtgccaataaccaagtttattcagtaaacaacttgtacttgtttcatctggttttattactctcacccataaacagtaatgactctctg

SEQ ID NO: 135 - DNA, 1815 bp, Homo sapiens
gcatcacttccctcgaagccatcattataccctacagagtagatgttggtaatccagaagaatctttagagatgcctcttcgaaaacaagaggaattggaatccacagtagcacgcatccaggacctcactgagaaactgggaatgatatccagccccgaagccaaactacaacttcagtatactttacaggaactagtttctaagaactcagcaatgaaggaagctttcaaagcacaggaaactgaggcagaaaggtatcttgagaattacaaatgctatagaaaaatggaagaggatatttacactaacctcagcaaaatggagacagttcttggacagtccatgtcctcgttgccactgtcttacagagaagctttagagcgcttggaacagagcaaggccttggtgtcaaatcttatatcaaccaaagaagagttaatgaaactacgacagatccttagactcttgagactcaggtgcacagaaaatgatggcatatgtttgctcaagattgtgtcggctctgtgggagaaatggctgagtttgctggaagctgctaaagagtgggagatgtggtgcgaagaactgaagcaggaatggaaatttgtcagtgaagaaattgaacgagaggcaattattttagataatcttcaggaagaactccctgaaatttccaaaacaaaagaggcagccaccacagaggaactctctgagctgctagactgtttatgccaatatggagagaacgtggagaagcaacagctgttactgactctacttcttcagcgcatcagaagtatccagaatgttcctgaaagctcaggggctgtggaaactgttccagcatttcaagaaattacttctatgaaagaacgatgcaacaagcttcttcagaaagttcagaaaaataaagaattggtgcagactgaaatccaagaaagacattccttcacaaaagagataattgctttgaagaatttctttcaacagaccacaacttcattccaaaatatggcattccaggatcacccagaaaagtcagaacaatttgaggagcttcaaagcatccttaagaaagggaaactaacttttgagaatattatggaaaaactgcgaatcaagtattccgaaatgtacaccatagtccctgcagagattgaatcccaggtggaagaatgcagaaaagctttagaagacatagatgagaagattagcaatgaagtcttaaaaagctcaccatcatatgcaatgaggagaaaaatagaagaaattaacaatgggcttcataatgttgaaaagatgttgcagcagaaaagcaaaaatattgagaaagctcaagaaattcaaaagaaaatgtgggacgagttagatctatggcattccaaactaaatgagctggattctgaagttcaggacattgttgaacaggacccaggacaggctcaagaatggatggataacttgatgattcctttccagcagtatcagcaagtatcacagagagcagagtgtagaacctcacagttgaataaggccacagttaagatggaggaatatagtgaccttctgaagagcactgaggcttggatagaaaataccagtcatttgctggccaatcctgctgactatgactctttgaggacactgagtcaccatgctagcactgtgcagatggctttggaagattcagaacagaagcacaatcttttacattcaatctttatggatctagaagacctgtcaataatttttgaaacagatgaattaacccaatccatacaagagttaagtaatcaagtaacagctttacaac

SEQ ID NO: 136 - DNA, 755 bp, Homo sapiens
tcaaagcatccttaagaaagggaaactaacttttgagaatattatggaaaaactgcgaatcaagtattccgaaatgtacaccatagtccctgcagagattgaatcccaggtggaagaatgcagaaaagctttagaagacatagatgagaagattagcaatgaagtcttaaaaagctcaccatcatatgcaatgaggagaaaaatagaagaaattaacaatgggcttcataatgttgaaaagatgttgcagcagaaaagcaaaaatattgagaaagctcaagaaattcaaaagaaaatgtgggacgagttagatctatggcattccaaactaaatgagctggattctgaagttcaggacattgttgaacaggacccaggacaggctcaagaatggatggataacttgatgattcctttccagcagtatcagcaagtatcacagagagcagagtgtagaacctcacagttgaataaggccacagttaagatggaggaatatagtgaccttctgaagagcactgaggcttggatagaaaataccagtcatttgctggccaatcctgctgactatgactctttgaggacactgagtcaccatgctagcactgtgcagatggctttggaagattcagaacagaagcacaatcttttacattcaatctttatggatctagaagacctgtcaataatttttgaaacagatgaattaacccaatccatacaagagttaagtaatcaagtaacagctttacaac

SEQ ID NO: 137 - DNA, 3039 bp, Homo sapiens
ctgcggttgtaatcgaggccagctttcagggacttgcttctacagacagctgcagcctgagtgtgctccaggcagacttgaaggttgtcaaaacattcaaggagcaagttggtgttctcgccaggccaagtcatggctttcaaaagatcacccttcttgtcacttagcgctaaataaagtttcttcaactcaagagccagcgtctcgtagtgcacctgctggccagaaccatcctccctgtaaagtctgggcatctccagcatctcctccacactgctgaggcactgactgagggtcaggaatagttcaaacaattttttatccaaattgatatatgcttcttctgtcatattttcctgtgtctgaaggttacttgcttcttggcgcaggtcttcaagttgggtggtataggttttcagttcttcagttgttgggtatctaaagttatacatagtcacgctgggtagaatacccatatttgtggaaacctgaggctccacaagctgagggagtgggagctttatttttgatgagagttcatgatgcagatattgccacttatctccattttggccctggggtgacaagatcgagtctggaacgtcattttcagggctggatgcctggttgcttgcagatgattcctgagttgtatcgttatcatgttggcaatactggggccacattttcttagcattaaattctatgaatttgatgaaatctttctgttccattggttttaactccagaacctgttgctgctggaaatctttttgtctgctgaattgtggcctttcagttacaatggattccaattcagaaaggttaactggttggagagcttcttgatgctctggctctgaggatttctttagaatggtaggatgctgatcttcactgtgcttctcctgaagcatcatctggactttttctaaattgcacttcactgttttcagtttcagggaaagcgcttcagcctcatgttgagtggctccattatctcccaggccctgatctttgcaagtctctaacagaaaggcaaccttgtgctcaatctctgttagcatagcctggcaccctaccagctgctgttccagcacctgctgcatgtctgcgtttaatgtttccggctcaactgccacgttggcttgttgcagccacagctccagctcggccacctgggtcttgcaggcatgcaggacttctgtgggctccggcctagttttctccaccctgggctccaaacctccttgcgcgtcagaagagtccagagtgtcagcctcaataggaggtgtggtgccctcttctgtttggttgggccttagggaacattctgggccttgctcagtgtttagtgagtctggtgtgaggatttgtgccatggaattatcagaggtgcttattttcccatatgcttcctgaacaattgttccagaggatgaggaagctctgtcttcttccatgtccttgtcatgcttccaaagtgaagaccaagactgaggcgatggctctgccttctcatctccattatcgctcttcacggaactttcttccacctcttcctcgactgctgccaggtaagacatggagcctcttctgttcaacttccgctcagaagcatccctctctgccactccaccttcctctgatgttacagctggcagcctatctctttctactccttcttgttcttgcttcaaatgctggtgaaggtttagtacggtggccttcaagtccaccaacaggtcttcttttctctggttcaaactcagaatctgtttctccatacgttcgatttctccctgtagttgtggcagcttgtcagcttggtctggtgacatatgttcaagggagaactgagctgaataattatttaagatctgtttcaaattttctatttcttcatcccattcattggtctgttttatgactacctttaataactcattttgttcttgagtcacattttccaatagttttatatcttgtaaaagctgatttgtccgctgaaacacaggcagaggtttcattcctgtttggggcaacctcagttccacttggtaagacactatctcagcaatggttttcttcatgggacgtatattttcaagtatgacctccccatgtttgagatgttcttcaggtgaaaaatcaaatatttcttttgataataggatagttttgatttttgaaactcttttttccattgattttacttcagattcaatagcaaccacatcatcagccattcgctgaatctgtggaaggctttccattattttttgttgtaaagctgttacttgattacttaactcttgtatggattgggttaattcatctgtttcaaaaattattgacaggtcttctagatccataaagattgaatgtaaaagattgtgcttctgttctgaatcttccaaagccatctgcacagtgctagcatggtgactcagtgtcctcaaagagtcatagtcagcaggattggccagcaaatgactggtattttctatccaagcctcagtgctcttcagaaggtcactatattcctccatcttaactgtggccttattcaactgtgaggttctacactctgctctctgtgatacttgctgatactgctggaaaggaatcatcaagttatccatccattcttgagcctgtcctgggtcctgttcaacaatgtcctgaacttcagaatccagctcatttagtttggaatgccatagatctaactcgtcccacattttcttttgaatttcttgagctttctcaatatttttgcttttctgctgcaacatcttttcaacattatgaagccattgttaatttcttctatttttctcctcattgcatatgatggtgagctttttaagacttcattgctaatcttctcatctatgtcttctaaagcttttctgcattcttccacctgggattcaatctctgcagggactatggtgtacatttcggaatacttgattcgcagtttttccataatattctcaaaagttagtttccctttcattgaattctagacct

SEQ ID NO: 138 - DNA, 575 bp, Homo sapiens
  misc_feature 563: n = a,c,g, or t
ccccacctccacgactatttattgagcgcctgttgtgtgtcacggggctatgagggccgtggggtgtttgggtggattatccacacaggtcccggcccctgcccgggctggagttgccacagcctgtgctcctggtcctcacctggaggggccagcaggctgccgtcccaccacacgtggcctctgcgcccagcacggtgctcgccgacagtggtgtctgaacccttggggacgagggcctgggccgcggtgaggccaccagaggcaggagtggccctgggggtcccgggcactgtcgcgcttgctgcaggcggcccagccgtgtatttatttttcacctatctccttcctgtcaaggcaggccgggctccagggctccccttgcgtggggcatgtaggtgggggaggcgtctgcaggtcacctggggggcccagccctctcccagccttgcctggctgagctgtgttccaggggagccctggacaagccctcataggcagggagggggtttccgaggccaggcatccgccgccccgtgtcgcatcctggaataaaatgtggntatggcatggtt

SEQ ID NO: 139 - DNA, 1794 bp, Homo sapiens
ctaacctttattgacaatctatatcgcaaaagtcaggaaagaggttgtgagctgattggattaaagacctggcacttcagtaactcagcacgcttccacttcactcaacttaagagagttcattgacagtgttaggatgtgaaggctgggaaacacttattttgcttcaagagttccacttggctctcccaaataggtacctcaaaaactgttagcaagcggcatttggatgtcttgacaggggctttgcagggatttttagggttttttccacattgtccacattaatggttggcatgattgtgcttgcaggccaagaaatgatcataccccttgccaaaggtaaaaaaaaaaaaaaaaaaatgagttgaaaattgaagtgacctctttccagctgagttgcaggcttattttgtaacctttcctcatccagttttccctgagaacctgggtttatctctagatagctgttcaggttttttagctgaggggtaagtatcctagctgagagttttgcatctttgggctgggtttgcagtggttgtgttttgcataaaatgtctagtctttgccacagatagtgagctacccactaatgagcccatggttttatttcagaagcacatgagggtgtgaaaccactctgttacctttctgtattgtcttagctattcaagccagtcagaggataatatatatattctcatcagcactcagagtagtcagtgaagagagtagatcacacttgggcacaccaggattcacataaacattgtatcttctctgtggatgctcaggccttgtctacaatgaggctttacaaccttcctttgttttggctcgggattacttcctggctgtctaataattgaaccataaccatgtaatattatgtaaaggcctggaaattactgttgctaaaaaaagtcatgtagtttcatgtagtgtagcatccttggcatcgttttccaaaatttgttccttctccctttttttttttctttcgtgtgtggcatgagtgtgtatctgtgtaaatatgattgtatatgtgttactccgatatgtaatccatttcactggctgagtttggcccctagccatgtgttaatataaagtaggcatggcttcccaatggaaatctctgagaatgacagtggagttgtgcaagcattttacattgccacataattgacttgccattttatggttaaaaacggcacattaggcagttgaatatgacgttaccttgcagactaaaaggttgaaggcccgaaactaacttttagctaacaataagggctgtgccccaatggaaactgagttcattttctgagaaaggtttggatgactgaaatatttcctctacagtcaaggactttggcatgtggtggctgaaactgagcttttttgtgtgggctccagttctcactgttctgcaatgctcatggcaagttgaatggtgagctagcttataaattaaagagctctgaactgtattcagaccgactgggtatctagcttactgttttaacatcattgttgaaaccagaccctgtagtccagtggtgctgccctgttgtgcaaactgctcctttttctcgtgtttttgtaaagagcttccatctgggctggacccagttcttgcacatacaagacaccgctgcagtcagctaggacctttccgccatgtattctattctgtagtaaagcatttccatcaacaatgcctaattgtatctgttatttttggtttaacacacactgattcatactaataaatattttcagttttac

SEQ ID NO: 140 - DNA, 691 bp, Homo sapiens
gtctctatggcatagtggaacatagtggctcgatgagagaaggccactacactgcttatgtgaaagtgagaacaccctccaggaaattatcggaacataacactaaaaagaaaaatgtgcctggtttgaaagcggctgatagtgaatcagcaggccagtgggtccatgttagtgacacttacttacaggtggttccagaatcaagagcacttagtgcacaagcctaccttcttttctatgaaagagtattataactattaatggtaatgattatttaggtcatttgtttttgaatgccacagtgataactataatatataatgtgcctttctagtcttccctcttctgtaggaatagcatgttcctcaaatggtcctgaactttttcaccattttggtgaacccttttaaagtaaatttactcaatgctttaaaattcatagtcttaaaataaatgtgaattttgtttccaggtatttattctggggtacaaaaacttcccagaatttacagtaggaaaggaaacccctttatgatgtggcttattattacaagcattcagaaatgatgctggctaagtcaaatcattccttgagacagtgattcctaaatgtaatgccgccttcctgaactctcacatattctatatcatggttattttaaaaaatatatttttagccttttgtaacctt

SEQ ID NO: 141 - DNA, 1570 bp, Homo sapiens
ctccaacatgctccgagatgatggaggctttgagtacaagcgggccattgtggactgtataatcagcattgtggaagagaaccctgagagtaaagaagcaggcctagcccacctttgtgaattcattgaggactgtgaacacactgttctggctactaagattctacacttgttgggcaaagagggccctagaacgcctgtcccctccaaatatatccgttttatttttaatagggttgtcctggagaatgaggctgtcagagctgctgctgtgagtgctttggctaaatttggggctcagaatgagagtcttctcccaagcatccttgtactcttacagaggtgtatgatggatactgatgacgaggtacgagacagagctaccttctatctgaatgtgctgcagcagaggcagatggcactaaatgccacatatatctttaatggtttgacggtctctgtaccagggatggaaaaagccttacaccagtacacgttggagccttcagaaaaaccgtttgacatgaaatcaattcctcttgctatggctcctgtctttgaacagaaagcagaaatcacacttgtggctactaagccagagaagttggctccttccaggcaagacattttccaagaacaattggctgccattcctgagtttctgaatataggacccttgttcaagtcttctgagcctgttcaacttacagaagcagagacagaatattttgttcgatgtatcaagcacatgtttaccaatcacatcgtgttccagtttgactgcaccaacactctcaatgaccagctgctggaaaaagtgacagtgcagatggagccatcagattcctatgaagtgctgtcttgtatcccagcccccagccttccttataaccaaccaggaatatgttacactcttgttcgtttgcctgatgatgaccctacagcagttgcaggctcctttagctgcaccatgaagtttacagtccgggactgtgaccctaacactggagttccagatgaggatgggtatgatgatgagtatgtgctggaagatctcgaagtgactgtgtctgaccatattcagaaagtactgaagcctaactttgctgctgcttgggaagaggtgggagatacctttgagaaagaggaaacctttgccctcagttctaccaaaacccttgaagaggctgtcaacaatatcatcacatttctgggcatgcagccatgtgagaggtccgataaagtacctgagaacaagaattcccattcgctctatctggcaggtatattcagaggtggctatgatttattggtgaggtccaggctggccttagccgatggagtgaccatgcaggtgactgtcagaagtaaagagagaacacctgtagatgttatcttagcttctgttggataaatgcttactggacaagaggaaactgatgcacactacatggtcagtgggcttttaggctagtggcatcagtttcccagaatcagacttttgaagatgaatgactttggagaagcaaattaaacatttggccctgagccagcagatcaagcaaatgtc

SEQ ID NO: 142 - DNA, 2702 bp, Homo sapiens
gcttggtacccgccctagaggccttcgggctcgagggggtgtttcgaatcaagcagcacgaaggcctggccactttctaccgaaagtctaagttcagccttcttagccagcatgacatttcattctacgaagccctcgagtccgacccacttcacaaagaactgctggagaaactagttttgtacccatcagcgcaggagaaggtgctccagagatcttctgttcttcaggtttcagttcttcagtctacaaaggactcttctaaaaggatatgtgttgctaatacccatctttactggcatcctaaaggtgggtatattcgcctcattcaaatggcagtagccttggctcacataagacatgtttcatgtgatctgtatcctggcataccagttatattttgtggggactttaatagtacaccatcaacaggaatgtatcattttgtcatcaatggcagcattccagaggatcatgaagactgggcttccaatggggaggaggaaagatgcaatatgtctcttacacatttcttcaagctgaaaagtgcttgtggtgaacctgcttacacaaattatgttggtggctttcatggatgtctagattacattttcattgacttaaatgctttagaggttgaacaggtgattccattacctagtcatgaagaagttaccacccaccaggccttacctagtgtttcccatccctctgatcacatagcacttgtatgtgatttaaaatggaaatagatgtgtgtttaatggaattgaagtctgaaaaggaagtagttattttagcagaaaatttaatatgaatcaaagcttatatgtaaacttcaaggaggaatggtaaaatgttcagccctcctagttatgttcctgatgtcttcgttatgaaactgttgatgtttgcatcatacatcttctctttccttgttttcctctacaattggaggagaaacaaatatatttcttactagcaaaatagaaaattgaattatttttctccaaattgagactctcagaaaaggaagattgaattagcgtgttttttgtttgtttgtttttgtttttgtttttgtttttttgagatggagtttcactcttgttgcccaggctggagtgcaatggcacaatctcggctcactgcaacctccgccccctgggtttaagcgattctcctgcctcagcttcccgagtagctgggattacaggcatgcgccaacatgtctggctaatttttgtatttttagtagaaatggggtttcgccacgttggccaggctggtcttgaactcctgacctcaggtgatccacccacctcggcctcccaaagtgttgggattacaggcgtgagccaccgcacccggcccttgtgtacatttttataagagaatttttttagctaggagttcagaatttttaaagtaccatttgaatgatcttaatttttctttcatgacaacacattccaaaatgaatcatgcttatgtactaagagggaaaatgtatttaagttaagggtgagagacttaagttataggtgaccttagagacctaaggtgagagacttgacacatggaaggagtaacattagggtctacctctacctcaatttagttagcgatttactacaatttcagagctttaacaaaagataaaaataaatcgtcaccaattgttattgcttctcatctttcatttttcaatgaacaagtaaggtattttcattcttatttttaggattttagtttttagtgtatggtacaaatgaacacagtttatattctaattcttactgcagctcattttaatttttaggatgcaagcacaatttagtattcaaagtgagtagcaacatattcaacttgatcccattgtcttcagttactcttgcccatgaaaaatgttcataaatgaacagggtatttgaccatatgatattagaaaatacagcacattactttatgagaaactacctactgatatgggcttgaaattttggatgaatcattgagcatttctacactagaagtaatttcaaaattgttggtttttataaacaggaaaaaggttgagtagtgggacttttaagcatctctgaaataaaaaacttctttttacagacaagcattatagtttgagttacagacaacagtgtgtatatatgtaatatatatatagtaaaatgaaatttaaatatgaagccaaactttttaaaattagaaactacaaatggttatactgattagtgtctagcctagagtggtaaccatgctttactaattcagttatgaaatacattatttataatgcattagctgtattagctgttgcttttttgatgttcaggataactatgttatctcatttctgcatttaattaatagctcgagtattaaaagcccactcccttcaagaaaagctttgattttccccagtcatgaaagcccttgtttcaaattctttaatctctgaacctagtatcataagaatttcctcttttgataacatctgtactttcatattctgctcactatcaaatgtattgttaacacttagtaagtttgaaaatgaaggggttttatctgcatttgacattgaaccttgaagtactttaagtactccaaggggaaaattaaagtggaagtttcttcggatcttgtttagaaaaaactataaataaaaaattgatgctacc

SEQ ID NO: 143 - DNA, 3504 bp, Homo sapiens
cgcgactcttgcctcccgggcgtcgttgctccacgggcctgcctccacccgcggggacaggtgccccggctggggtctgttgggaagatggcgaccccgggcatgagctggcagcagcactattacggcggctcggcggccaaattcgcgccctcgccggccaccgcacagctggctgggcacagcatggactacagccaggagatgcacctgaaaatgagcaagaaaatcgcccagctcaccaaggtaatatatgctttaaacactaaaaatgatgagcatgaatctgcaattcaagccctcaaagatgctcatgaagaagaaattcaacaaattcttgctgaaacaagagaaaaaatattgcagtataaaagcaaagtaacagaggagctagaccttagaagaaagattcaagttttagaatcatcattagaagatcacataaaaatgaagcagcaggctttgacagaatttgaagcttataagcacagagttgaggacatgcaactttgtgcagaagcccagcatgtccaacgcatagtgaccatgtctagagaagtcgaagagattagaaggaaatttgaagaaaaattacggagctttggacaacttcaagtacagtttgaaaaagacaaacgattggcattggaagacttgcaagctgctcacagacgggagatacaagagctattgaagtcacagcaggatcacagtgcctcagtaaataaaggccaggaaaaggcagaggaactacacagaatggaggtggagtccctaaacaaaatgcttgaggagctaagacttgaacggaagaaactaattgaggattatgaaggcaagttgaataaagctcagtccttttatgaacgtgagcttgatactttgaaaaggtcacagctttttacagcagaaagcctacaggccagcaaagaaaaggaagctgatcttagaaaagaatttcagggacaagaagcaattttacgaaaaactataggaaaattaaagacagagttacagatggtacaggatgaagctggaagtcttcttgacaaatgccaaaagcttcagacggcacttgccatagcagagaacaatgttcaggttcttcaaaaacagcttgatgatgccaaggagggagaaatggccctattaagcaagcacaaagaagtggaaagtgagctagcagctgccagagaacgtttacaacagcaagcttcagatcttgtcctcaaagctagtcatattggaatgcttcaagcaactcaaatgacccaggaagttacaattaaagatttagaatcagaaaaatcgagagtcaatgagagattatctcaacttgaagaggaaagagcttttttgcgaagcaaaacccaaagtctggatgaagagcagaagcaacagattctagaactggagaagaaagtaaatgaagcaaagagaactcagcaagaatattatgaaagggaacttaaaaacctgcaaagtagattggaagaggaggtgactcaattaaacgaggcccattctaagactttggaagaattagcttggaagcaccatatggcaattgaagctgtccacagtaatgcaattagggataagaaaaaactgcaaatggatttggaagaacaacataacaaagataaactaaacctggaagaggataaaaatcagcttcaacaagagctagaaaacctaaaggaagtactggaagacaagttgaacacagccaatcaagagattggccacctccaagatatggtaaggaaaagtgaacaaggtcttggctctgcagaaggacttattgctagtcttcaggactcccaggaaaggcttcagaatgagcttgacttgactaaagacagcctaaaggagaccaaggatgctctattaaatgtggagggtgagctagaacaagaaaggcaacagcatgaagaaacaattgctgccatgaaagaagaagagaagctcaaagtggacaaaatggcccatgacttagaaattaagtggactgaaaatcttagacaagagtgttctaaacttcgtgaagagttaaggcttcaacatgaagaggataagaagtcagcaatgtctcaacttttgcagttgaaagatcgagagaaaaatgcagcaagagattcatggcagaagaaagtagaagatctcttaaaccagatttccttgctgaaacagaatctggagatacagctttcccagtctcagacttctttgcaacaactgcaagcccagtttacgcaagaacgacagcggcttacgcaagagcttgaagaattagaggagcaacatcagcaaagacacaaatcattaaaagaagcacatgtccttgcatttcaaactatggaagagaccagggaatcagccttggagaaagcacgtctcttccgacagcaaaacactgggcaggttcattttaagtatcatttatctagacttgcagttgcactcaaagtatttctacaaagttgctagtttttttagatcaaaagattacagttacctcattttatcaaaataagtattaaataaaaagtaagcacaagtaccaataactgcctcaaaaatacttgttatatattttattgtaactggttttataaaatttcctagtaatatcgtctcaatgaaaagcaaaaaaaaaaaaaaaaaaaaaaaaaaaaaatccaactagttgttttaacaaacatatataatctttttttagtggcaccagaattctatattctgttctttgtaagagcaatctcttttcttttggaatatttaatcttaacagaaagctagtgataaatgctgttcttaagatttgcctttttctctcacaagaaagggttaacctaacaaattaacgatgcacacattaaggaagcgtttaacttcctcaagcaaacagtgtcaacacttctcacatgttggtaatcaacatgttcctgcctaagcttacatagtagttccctggaataattcaggctgttaaataccaggatattaaatcctttacattttcaaatactgcttttaattctgtaattcagatttttaattcagacaggcccttccatgaattattcaaattagggggaagtttctcaagagctcaggatacactgagtttcttgccctatctggtctggaaaccctggttttcacagtcaggattataatgcagatagcgtagaactcatgcaggctgagttatgttttcaaactatctttcattcttgtggtagggaacttaccctcaagtgtagtatcttttactcttgagccatctggtagcgtggaattgtttttctatttttcacctgcctattttatagacctgtattgaccttttattcatcagggataaaggatgttgctttcaccctgcggtattgttttccctctgttgtatgtatagatatatgctacttgtcaattttccaattttgaaaatgatctgtatgtacttttagttgtattaataaagtgacattgagtgtc

SEQ ID NO: 144 - DNA, 3504 bp, Homo sapiens
cgcgactcttgcctcccgggcgtcgttgctccacgggcctgcctccacccgcggggacaggtgccccggctggggtctgttgggaagatggcgaccccgggcatgagctggcagcagcactattacggcggctcggcggccaaattcgcgccctcgccggccaccgcacagctggctgggcacagcatggactacagccaggagatgcacctgaaaatgagcaagaaaatcgcccagctcaccaaggtaatatatgctttaaacactaaaaatgatgagcatgaatctgcaattcaagccctcaaagatgctcatgaagaagaaattcaacaaattcttgctgaaacaagagaaaaaatattgcagtataaaagcaaagtaacagaggagctagaccttagaagaaagattcaagttttagaatcatcattagaagatcacataaaaatgaagcagcaggctttgacagaatttgaagcttataagcacagagttgaggacatgcaactttgtgcagaagcccagcatgtccaacgcatagtgaccatgtctagagaagtcgaagagattagaaggaaatttgaagaaaaattacggagctttggacaacttcaagtacagtttgaaaaagacaaacgattggcattggaagacttgcaagctgctcacagacgggagatacaagagctattgaagtcacagcaggatcacagtgcctcagtaaataaaggccaggaaaaggcagaggaactacacagaatggaggtggagtccctaaacaaaatgcttgaggagctaagacttgaacggaagaaactaattgaggattatgaaggcaagttgaataaagctcagtccttttatgaacgtgagcttgatactttgaaaaggtcacagctttttacagcagaaagcctacaggccagcaaagaaaaggaagctgatcttagaaaagaatttcagggacaagaagcaattttacgaaaaactataggaaaattaaagacagagttacagatggtacaggatgaagctggaagtcttcttgacaaatgccaaaagcttcagacggcacttgccatagcagagaacaatgttcaggttcttcaaaaacagcttgatgatgccaaggagggagaaatggccctattaagcaagcacaaagaagtggaaagtgagctagcagctgccagagaacgtttacaacagcaagcttcagatcttgtcctcaaagctagtcatattggaatgcttcaagcaactcaaatgacccaggaagttacaattaaagatttagaatcagaaaaatcgagagtcaatgagagattatctcaacttgaagaggaaagagcttttttgcgaagcaaaacccaaagtctggatgaagagcagaagcaacagattctagaactggagaagaaagtaaatgaagcaaagagaactcagcaagaatattatgaaagggaacttaaaaacctgcaaagtagattggaagaggaggtgactcaattaaacgaggcccattctaagactttggaagaattagcttggaagcaccatatggcaattgaagctgtccacagtaatgcaattagggataagaaaaaactgcaaatggatttggaagaacaacataacaaagataaactaaacctggaagaggataaaaatcagcttcaacaagagctagaaaacctaaaggaagtactggaagacaagttgaatacagccaatcaagagattggccacctccaagatatggtaaggaaaagtgaacaaggtcttggctctgcagaaggacttattgctagtcttcaggactcccaggaaaggcttcagaatgagcttgacttgactaaagacagcctaaaggagaccaaggatgctctattaaatgtggagggtgagctagaacaagaaaggcaacagcatgaagaaacaattgctgccatgaaagaagaagagaagctcaaagtggacaaaatggcccatgacttagaaattaagtggactgaaaatcttagacaagagtgttctaaacttcgtgaagagttaaggcttcaacatgaagaggataagaagtcagcaatgtctcaacttttgcagttgaaagatcgagagaaaaatgcagcaagagattcatggcagaagaaagtagaagatctcttaaaccagatttccttgctgaaacagaatctggagatacagctttcccagtctcagacttctttgcaacaactgcaagcccagtttacgcaagaacgacagcggcttacgcaagagcttgaagaattagaggagcaacatcagcaaagacacaaatcattaaaagaagcacatgtccttgcatttcaaactatggaagagaccagggaatcagccttggagaaagcacgtctcttccgacagcaaaacactgggcaggttcattttaagtatcatttatctagacttgcagttgcactcaaagtatttctacaaagttgctagtttttttagatcaaaagattacagttacctcattttatcaaaataagtattaaataaaaagtaagcacaagtaccaataactgcctcaaaaatacttgttatatattttattgtaactggttttataaaatttcctagtaatatcgtctcaatgaaaagcaaaaaaaaaaaaaaaaaaaaaaaaaaaaaatccaactagttgttttaacaaacatatataatctttttttagtggcaccagaattctatattctgttctttgtaagagcaatctcttttcttttggaatatttaatcttaacagaaagctagtgataaatgctgttcttaagatttgcctttttctctcacaagaaagggttaacctaacaaattaacgatgcacacattaaggaagcgtttaacttcctcaagcaaacagtgtcaacacttctcacatgttggtaatcaacatgttcctgcctaagcttacatagtagttccctggaataattcaggctgttaaataccaggatattaaatcctttacattttcaaatactgcttttaattctgtaattcagatttttaattcagacaggcccttccatgaattattcaaattagggggaagtttctcaagagctcaggatacactgagtttcttgccctatctggtctggaaaccctggttttcacagtcaggattataatgcagatagcgtagaactcatgcaggctgagttatgttttcaaactatctttcattcttgtggtagggaacttaccctcaagtgtagtatcttttactcttgagccatctggtagcgtggaattgtttttctatttttcacctgcctattttatagacctgtattgaccttttattcatcagggataaaggatgttgctttcaccctgcggtattgttttccctctgttgtatgtatagatatatgctacttgtcaattttccaattttgaaaatgatctgtatgtacttttagttgtattaataaagtgacattgagtgtc

SEQ ID NO: 145 - DNA, 1877 bp, Homo sapiens
cagcaaagcatggttcagaaacagctagaacagattcgtaaacaacagaaagaacatgctgaattgattgaagattatcggatcaaacagcagcagcaatgtgcaatggccccacctaccatgatgcccagtgtccagccccagccacccctaattccaggtgccactccacccaccatgagccaacccacctttcccatggtgccacagcagcttcagcaccagcagcacacaacagttatttctggccatactagccctgttagaatgcccagtttacctggatggcaacccaacagtgctcctgcccacctgcccctcaatcctcctagaattcagcccccaattgcccagttaccaataaaaacttgtacaccagccccagggacagtctcaaatgcaaatccacagagtggaccaccacctcgggtagaatttgatgacaacaatccctttagtgaaagttttcaagaacgggaacgtaaggaacgtttacgagaacagcaagagagacaacggatccaactcatgcaggaggtagatagacaaagagctttgcagcagaggatggaaatggagcagcatggtatggtgggctctgagataagtagtagtaggacatctgtgtcccagattcccttctacagttccgacttaccttgtgattttatgcaacctctaggaccccttcagcagtctccacaacaccaacagcaaatggggcaggttttacagcagcagaatatacaacaaggatcaattaattcaccctccacccaaactttcatgcagactaatgagcgaaggcaggtaggccctccttcatttgttcctgattcaccatcaatccctgttggaagcccaaatttttcttctgtgaagcagggacatggaaatctttctgggaccagcttccagcagtccccagtgaggccttcttttacacctgctttaccagcagcacctccagtagctaatagcagtctcccatgtggccaagattctactataacccatggacacagttatccgggatcaacccaatcgctcattcagttgtattctgatataatcccagaggaaaaagggaaaaagaaaagaacaagaaagaagaaaagagatgatgatgcagaatccaccaaggctccatcaactccccattcagatataactgccccaccgactccaggcatctcagaaactacctctactcctgcagtgagcacacccagtgagcttcctcaacaagccgaccaagagtcggtggaaccagtcggcccatccactcccaatatggcagcaggccagctatgtacagaattagagaacaaactgcccaatagtgatttctcacaagcaactccaaatcaacagacgtatgcaaattcagaagtagacaagctctccatggaaacccctgccaaaacagaagagataaaactggaaaaggctgagacagagtcctgcccaggccaagaggagcctaaattggaggaacagaatggtagtaaggtagaaggaaacgctgtagcctgtcctgtctcctcagcacagagtcctccccattctgctggggcccctgctgccaaaggagactcagggaatgaacttctgaaacacttgttgaaaaataaaaagtcatcttctcttttgaatcaaaaacctgagggcagtatttgttcagaagatgactgtacaaaggataataaactagttgagaagcagaacccagctgaaggactgcaaactttgggggctcaaatgcaaggtggttttggatgtggcaaccagttgccaaaaacagatggaggaagtgaaaccaagaaacagcgaagcaaacggactcagaggacgggtgagaaagcagcacctcgctc

SEQ ID NO: 146 - DNA, 2447 bp, Homo sapiens
tgcaaaagtagttacaaatgctcgaagtcctggggcaaaatgctatggcattgtaactatgtcttcaagcacagaggtgtccaggtgtattgcacatcttcatcgcactgagctgcatggacagctgatttctgttgaaaaagtaaaaggtgatccctctaagaaagaaatgaagaaagaaaatgatgaaaagagtagttcaagaagttctggagataaaaaaaatacgagtgatagaagtagcaagacacaagcctctgtcaaaaaagaagagaaaagatcgtctgagaaatctgaaaaaaaagaaagcaaggatactaagaaaatagaaggtaaagatgagaagaatgataatggagcaagtggccaaacatcagaatcgattaaaaaaagtgaagaaaagaagcgaataagttccaagagtccaggacatatggtaatactagaccaaactaaaggagatcattgtagaccatcaagaagaggaagatatgagaaaattcatggaagaagtaaggaaaaggagagagctagtctagataaaaaaagagataaagactacagaaggaaagagatcttgccttttgaaaagatgaaggaacaaaggttgagagaacatttagttcgttttgaaaggctgcgacgagcaatggaacttcgaagacgaagagagattgcagagagagagcgtcgagagcgagaacgcattagaataattcgtgaacgggaagaacgggaacgcttacagagagagagagagcgcctagaaattgaaaggcaaaaactagagagagagagaatggaacgcgaacgcttggaaagggaacgcattcgtattgaacaggaacgtcgtaaggaagctgaacggattgctcgagaaagagaggaactcagaaggcaacaacagcagcttcgttatgaacaagaaaaaaggaattccttgaaacgcccacgtgatgtagatcataggcgagatgatccttactggagcgagaataaaaagttgtctctagatacagatgcacgatttggccatggatccgactactctcgccaacagaacagatttaatgactttgatcaccgagagaggggcaggtttcctgagagttcagcagtacagtcttcatcttttgaaaggcgggatcgctttgttggtcaaagtgaggggaaaaaagcacgacctactgcacgaagggaagatccaagcttcgaaagatatcccaaaaatttcagtgactccagaagaaatgagcctccaccaccaagaaatgaacttagagaatcagacaggcgagaagtacgaggggagcgagacgaaaggagaacggtgattattcatgacaggcctgatatcactcatcctagacatcctcgagaggcagggcccaatccttccagacccaccagctggaaaagtgaaggaagcatgtccactgacaaacgggaaacaagagttgaaaggccagaacgatctgggagagaagtatcagggcacagtgtgagaggcgctccccctgggaatcgtagcagcgcttcggggtacgggagcagagagggagacagaggagtcatcacagaccgaggaggtggatcacagcactatcctgaggagcgacatgtggttgaacgccatggacgggacacaagcggaccaaggaaagagtggcatggtccaccctctcaagggcctagctatcatgatacgaggcgaatgggtgacggccgggcaggagcaggcatgataacccaacattcaagtaacgcatccccaattaatagaattgtacaaatcagtggcaattccatgccaagaggaagtggctccggatttaagccatttaagggtggacctccgcgacgattctgaaaatgagctctctgccaaggttttaagataatttattgaaatctcctgtaaactttacttgactacttatgaagaggacctctgacttgcttgagagttctgtcagacttttctttttaaaaatttaacatgattgcttttctcaattttggagaagatgtttaaatagttctgttgtaacttttaatagttttgtgtatcattcaactttttttcttgcagcaccgaggcacatttgaaaagatggaattgaagtcgttttgtttaacgctgtgtgaatataaagagtagtttgcagctgtgtggtagtggtttaatttgcagccttagctctgtggtgtctggctctagagttacttctttttaccaagcattttcagcctccattttgaaggctgtctacacttaagaagtcttagctgtctaatttttagagaataagattgttcattgcatttctgagtattatgtaacctatttttgcagaaggtactgttacattaagtgcatctgtgtatcctggtttaaaaaaatgtaatcttttttgaaataaaccttcatattctgtatagttgct

SEQ ID NO: 147 - DNA, 2436 bp, Homo sapiens
  misc_feature 2284,2285: n = a,c,g, or t
ggctgctagcacagtgccgccccatggcccagggctgcccgtgctggcaatgctcttgccagcaagaggcgagagttgttgaggtctgcagacttgggggcaagtgaaggcccaagctgcccgagaagagcaggggtgtcccaaggggaccacactgaactcttgcatgtgcaccaaagccagccccaatcatggccggcacaagggttctgcaggaccagcctgtggctctcatgtctaccagcgtacagacagcaaagacacacgacacgatatacaggagcagaggcgcccagaacacgctgtccccaatgccagccacaagcggggccagctcagggtgtagtgggtgaagccgtcctgcagctctgtgatccacaaggcggaggtggcagtagcacaggactccaccgctttggaggctgcccagtcgaatttgggagccagtgagagtcctgacagcagcacattggccaccagaagacacccaaaggtagggaggcggcagatactgcttaagttcaggagctcctctggccattgctcacccaaggttccccccagaggcatccacagcctggggctccttcctcctgcctggagtttgctttcctatgcccaggccccaagcaggaggactggctctgcctcgagtcctcaccccttcttctttccctgctgtgtccagctggtttcttactttcctcctacctatgctatgcccagttctgtttcctcttcttcttcccccaggctggctgaaaactaagtttcaaaatacaaaatgcatgctacagatttcattgctgtagatgaaatgctgacagcttttctatttaaactctggttgttctcttcatttctttaaacattagaataattaagcctcatgatagatgtgcctttgtaacttgaaagtatgaccctcaattttcacaatttaaaaaaattttttaatttttcttttcataaatttttggcaaacaggtagtatttagttattgagtaactcctttagtggagatttgtgagattttgttgcacccatcacccaagcagtacacatggaatccagtttgtagtctcttatctttctcccccttcccaccgttttcccccgagtatcattcttttttttgagactgagtcttattctgtcacccaggctggaatgctacgtcgcgatgtcagctcgctgcaacccttgcttcccgaattcatgtggtcctcctgcttcagcctcctgagtagctgggattagaggcgtgggtcacgacgcccaactaaattttttgtatttttagtcgtgactgggtttcaccaaattggccagtctgttctcgaactcctgacctcaagtgatgcgcctgccttggcctcccctagggctgggattataagaatgagccaccagaacccagccaaacttccccccaccccgcctttttgttttgttttggttttttctaatctcctgaagtcattctttgagttgtcatgtagattaatgggtttctcaaactactagaaaactagttgaagaaataaacaggcagtttgtgaatattaaacagaacagtggtgctgagcatggctaaagcatctctgcattcacagggagaggagcggaagaccttctggtgtgggctgggcagcaattcacttgaaggagaaacagcccgggtgtggagaggcggctgtccttggagggatcctttctaaggagctgagaaatcaacgtagagcttcctctatctgattctctaacaactgcagaccttccatgagtcaagctttgtgtcaaaaggacaaattaaaaggacctataaaaggcatcaccaagcccagtggacagatgccccaggctgcacattctgtcagtgctgttctggaaaaggcccaaacacatgctgaaacatggaagaactcatttatgtatctcatttgatctcatcacaacctgagacacaggtcataatagagacttcggggctcattttatacccggtgaaccagccaactttcatgcagttgagaaaagtataagaagccagccctcgggaaccaccaggagccaggagcaccccggccccgcagggccccaagttcagcctgccccaacccctctggtgcagagttcctgggacaccatctgcagccccgccacgcccctcaaagtcaagggcacaggcggctggggcttccccgcccgcccgacgacttcctgctgccccagcagccgccacagtcaccaccacggcccctggacgacccagagctcctnntgccgccccctgacttcatggaggcgccccaggacttcgtgccccctccccctgctgtcgccaagaggcctcctatgccccacccccacaagaggcacgaagcatcaatgttcagatgccgcaaatgaataaaataaatgaataaaagttc

SEQ ID NO: 148 - DNA, 884 bp, Homo sapiens
cgctcatcatcccccccgacgccgtcgcggtggactgcaaggacccagatgatgtggtaccagttggccaaagaagagcctggtgttggtgcatgtgctttggactagcatttatgcttgcaggtgttattctaggaggagcatacttgtacaaatattttgcacttcaaccagatgacgtgtactactgtggaataaagtacatcaaagatgatgtcatcttaaatgagccctctgcagatgccccagctgctctctaccagacaattgaagaaaatattaaaatctttgaagaagaagaagttgaatttatcagtgtgcctgtcccagagtttgcagatagtgatcctgcaacattgttcatgactttaacaagaaacttacagcctatttagatcttaacctggataagtgctatgtgatccctctgaacacttccattgttatgccacccagaaacctactggagttacttattaacatcaaggctggaacctatttgcctcagtcctatctgattcatgagcacatggttattactgatcgcattgaaaacattgatcacctgggtttctttatttatcgactgtgtcatgacaaggaaacttacaaactgcaacgcagagaaactattaaaggtattcagaaacgtgaagccagcaattgtttcgcaattcggcattttgaaaacaaatttgccgtggaaactttaatttgttcttgaacagtcaagaaaaacattattgaggaaaattaatatcacagcataaccccaccctttacattttgtgcagtgattattttttaaagtcttctttcatgtaagtagcaaacagggctttactatcttttcatctcattaattcaattaaaaccattacctt

SEQ ID NO: 149 - DNA, 2872 bp, Homo sapiens
tgtatgtaaaaaaagttccgtgtccaaattatctactccaaaagaacgtgtgtcaagacgctttgggcggagttttacctgtgatagctgtggatttggctttagctgtgaaaaattattagatgagcacgtgctaacctgtactaacagacatttataccaaaacacaagatcttaccatagaatagtagatattagagatggaaaagacagtaacatcaaagctgaatttggtgaaaaagattcttccaaaacattttctgcacagacggacaaatacagaggagacacaagccaggctgctgatgattcagcttcaaccactggaagcagaaaaagtagcacagtggagtctgaaatagcaagcgaagagaaaagcagagctgctgagaggaaaaggattattattaagatggagccagaagatattcctacagatgaactgaaagactttaacattattaaagttactgataaagactgtaatgaatccactgacaatgatgaattagaagatgaacctgaagagccattttatagatactatgttgaagaagatgtcagcataaaaaaaagtggtaggaaaactctaaaacctcgaatgtcagtaagtgctgatgaaagaggtggtttagagaatatgaggccccctaacaacagcagtccagtacaagaggatgctgaaaatgcatcttgtgagctgtgtggacttacaataaccgaggaggacctgtcatctcattacttagccaaacacattgaaaatatctgtgcatgtggtaaatgtggacaaatacttgtaaagggtaggcggcttcaggaacatgctcaacgatgtggcgagccccaagatctgaccatgaatgggttaggaaatactgaggagaaaatggacttggaagagaatcctgatgagcagtccgaaataagagatatgtttgttgaaatgctggatgattttagggacaatcattaccagataaacagtatccaaaaaaagcagttatttaaacattctgcctgcccttttcgatgtcctaattgtggccagcgttttgaaactgaaaatctagtggttgaacatatgtctagctgcttagatcaagatatgtttaagagtgccatcatggaagaaaatgaaagagatcacagacgaaagcatttttgtaatctgtgtggaaaaggattttatcagcggtgtcacttaagagaacactatactgttcatactaaggaaaaacagtttgtttgtcaaacatgtggaaagcagtttttaagagagcgtcagttgcgactgcacaatgatatgcacaaaggcatggccaggtatgtctgttccatttgtgatcaaggaaacttcagaaaacatgaccatgtacggcatatgatttctcatttatctgctggtgagactatatgccaggtctgctttcagatattcccaaataatgaacagttggagcagcacatggatgttcatctgtatacatgtggaatatgtggagcaaaatttaatttgaggaaagatatgagatcacattataatgccaagcatttgaaaagaacctgagtgattttctactgtactaatgtttagatgatagcagataaaacaccaaagcaaaggatatgagctatttaggaattgattatataagatgatttgttagaaacaaatttcaaggcccttttaactttaatatttttgtttaggattttaagtatctacatttaggtattaaatgtttatcatttttgttgtttcttaatagaattatttgtttttagtttttcttagctatgattaaaatttttaaatgtagactacaagtggttgttacccattcaatgactattaaactttagtttttcatcaataaggtgatgacttcactatttctatgtgtttttttttttttaaggttatcctgtgaaattttaaacccagaatcattggccatttctgtttaaattttaaaaattccttaagtaattatttgaaactatcccgtttgcttttagtgagttaactactctttattcccccttattaatgaaattcatattcttaaattgacaagcttattaggcaagttaggtgcactgaatctaacctttaaggttgacatgggctcaaacttggcctaaaaagatgatgaacctgaggaaatttttataaatgaatatttcctataattgataaaatattatcatttaattatcacatttaaaacttatattaagtgtaaattccagtggctttacctcacttgaaaaattagtggggataagccattttgttttgtgatattaaatttaactatgatagttaattaaaaagacatatcttgtattcattaaaaatattttaatttaaaatattctgatttctaaagtgtgttagcttatcaattatttttgtttataaatagactttaatagctctctaagaatatgacctctaaaggaaaagatgattttttacaatacatacttctggaactttgagatttgagaaagcttccatgtatattgataaatctaataaaataaagagatcaattataaacctggttgttctataaaagtagagtgcacaaaaaaatgtcttgtgttttatactgtctaagatttggaggaaatgtggcaaattgcagtttatcgccatattttattatcatttttttctgtaaaagactataaaacttgaggattataaaataatcacagagtatatcaatggaaacagtttatcattttttcagttaaagtagtagtattgttagttgttgctgacacagggtctacataattacatgtgaattaaaacattggcaaaactgacccaccaataaacacatctattgaatag

SEQ ID NO: 150 - DNA, 1253 bp, Homo sapiens
ctgcttttgacaggcattttagaacacttaagaacttatatggtaaacaaataatagtaaatttgcttggatctaaggaaggtgaacatatgctaagtaaagctttccagagtcatttgaaagcttctgaacatgctgctgatatccagatggtgaattttgactatcatcaaatggttaagggaggaaaggcagaaaaattacatagtgttcttaaacctcaagtccagaagtttctagattatggatttttttatttcaatggaagtgaagttcaaagatgccagagtggtacagttcgaacaaactgcttggattgtcttgatagaacaaatagtgtgcaggcatttcttggcttagagatgctagctaaacagttggaagctcttggtttagctgaaaagcctcagttggtgactcgctttcaagaagtttttcggtcaatgtggtccgtgaatggtgattcaatcagtaagatatatgcaggaactggagctcttgaagggaaagcgaagttaaaagatggtgctcgctctgttacccgaacaattcagaataacttctttgacagctccaagcaagaggccattgatgttttgctactgggaaatactctgaatagtgatttagctgacaaagctcgagcacttttaactactggaagtttgcgtgtttctgagcagacattacagtcagcatcttctaaagtactaaagagcatgtgtgagaatttctacaaatattcaaagcctaagaaaattcgagtatgtgtcggaacctggaatgtgaatggtgggaagcaatttcgcagcatagcttttaagaatcagacactcactgactggcttcttgatgcacccaagttagctggcatccaggagtttcaagataaaagaagtaagccaactgatatatttgcaattggttttgaagaaatggtagaattgaatgctggaaacattgtgagtgcaagcacaacaaatcagaagctctgggctgtagaacttcagaagacaatctccagagacaacaagtatgtgctgctggcttctgaacagttggtgggcgtctgtttgtttgtttttatcagaccacagcatgctccttttatcagggatgttgcagttgatactgtgaagactggaatgggaggtgcaactggaaataagggagcagttgcaatccgaatgctcttccatacaaccagcctttgcttcgtctgtagccactttgctgcagggcagtcacaagtc

SEQ ID NO: 151 - DNA, 1444 bp, Homo sapiens
  misc_feature 32: n = a,c,g, or t
gggtaaagagaaagaaacttaagttttctttnacagaactccaccattgtgggctttgagagagccctaaagcattgtaccctcttcccaaatccaaaatgattgggcttttcctcttcttctcctgggcttttggaacaggcagagctataaagcgcttatttgtaatttctaccctccttctggaagtcagatccttcaggtgattgcctactggccacaagggcacccatcatttccgtggcctctgtggtttctatccctgcctttctgggggcagaaatgtctgctgcagtccttccttttggaaatctgaagacttttggaattgccccttttttggttacgatttagttttgatgagatgacaagaggatgctggagaccataaactgttgaattacttcttcaaccaaatcagaggggtttggggtttgactgacttcagcatgcttatgaagtctgtgtgtgcttcttattgtgcatatgagtgaagaaatcaaacatggtcccacagatggtgttgcagtctttgcaccagtgattgccagcatcataatactcataagcagcagtgggctgatccaactgcttagtggctgactgggggctttcggcaggcttggggctcttagtacgaaacttctcattgtttacttttgattccttgttggaggaggagtttgagaacgatgacactttttctgggctcttagatttttctgctttcccaggcttctctgtaggctctctactgtcacttaaagacttctgggatttatcgaagatgttaattcccaagatctgagccactttgtccagttcagattgcttcttttctgcctcttctgcctcttgccgtagctctgcaatgtccttcataatgttatcctgaagccgactcacctccaccaagagaggatctttgtggccatccttctcccttcgtttcttgcgcagcatttctccttgttgtttatgaagccgctctaactcggtcctaagatagtacatcttcttctggcgggcttcccggtcattctttagtttttccctctcttcaataaccttttgcttctgggaagcacggttcttctcatcagagatcttctctggattatatcttatgagtgatggaatggacacctggacaggcacttgggccgcaggaattgagcctcgcagagactctttctgcttaggcttatcaggagtcacagtggggatcacacgaagattgggacggctacgagtagcttgtttggttattggcattatcctgtgtggttcaggtacagggtggtttgacggttgagaggtgggatacatgggccatctggaggctgcatatgccatgtagtgcctataggcatcaaaagaggcagggggaatggcaggtccctggtagttcggagtaggccatgaggccggccttcatggccta

SEQ ID NO: 152 - DNA, 619 bp, Homo sapiens
agctgaagtcgacgacttctcctgggagcccccgactgaggcggagacgaaggtgctgcaggcgcgacgggagcggcaagatcgcatctcccggctcatgggcgactatctgctgcgcggttaccgcatgctgggcgagacgtgtgcggactgcgggacgatcctcctccaagacaaacagcggaaaatctactgcgtggcttgtcaggaactcgactcagacgtggataaagataatcccgctctgaatgcccaggctgccctctcccaagctcgggagcaccagctggcctcagcctcagagctccccctgggctctcgacctgcgccccagcccccagtacctcgtccggagcactgtgagggagctgcagcaggactcaaggcagcccaggggccacctgctcctgctgtgcctccaaatacagatgtcatggcctgcacacagacagccctcttgcagaagctgacctgggcctctgctgaactgggctctagcacctccctggagactagcatccagctgtgtggccttatccgcgcatgtgcggaggccctgcgcagcctgcagcagctacagcactaagagaagcccctgagaaaaaccctctagaaaaac

SEQ ID NO: 153 - DNA, 1728 bp, Homo sapiens
cttctctactttccaaggggaaactagcgctgacatttctttctacttcaaaacattaaccccctggggagtgtttcttgaaaatatgggaaaggaagatttcatcaagctggagctgaagtctgccacagaagtgtccttttcatttgatgtgggaaatgggccagtagagattgtagtgaggtcaccaacccctctcaacgatgaccagtggcaccgggtcactgcagagaggaatgtcaagcaggccagcctacaggtggaccggctaccgcagcagatccgcaaggccccaacagaaggccacacccgcctggagctctacagccagttatttgtgggtggtgctgggggccagcagggcttcctgggctgcatccgctccttgaggatgaatggggtgacacttgacctggaggaaagagcaaaggtcacatctgggttcatatccggatgctcgggccattgcaccagctatggaacaaactgtgaaaatggaggcaaatgcctagagagataccacggttactcctgcgattgctctaatactgcatatgatggaacattttgcaacaaagatgttggtgcattttttgaagaagggatgtggctacgatataactttcaggcaccagcaacaaatgccagagactccagcagcagagtagacaacgctcccgaccagcagaactcccacccggacctggcacaggaggagatccgcttcagcttcagcaccaccaaggcgccctgcattctcctctacatcagctccttcaccacagacttcttggcagtcctcgtcaaacccactggaagcttacagattcgatacaacctgggtggcacccgagagccatacaatattgacgtagaccacaggaacatggccaatggacagccccacagtgtcaacatcacccgccacgagaagaccatctttctcaagctcgatcattatccttctgtgagttaccatctgccaagttcatccgacaccctcttcaattctcccaagtcgctctttctgggaaaagttatagaaacagggaaaattgaccaagagattcacaaatacaacaccccaggattcactggttgcctctccagagtccagttcaaccagatcgcccctctcaaggccgccttgaggcagacaaacgcctcggctcacgtccacatccagggcgagctggtggagtccaactgcggggcctcgccgctgaccctctcccccatgtcgtccgccaccgacccctggcacctggatcacctggattcagccagtgcagattttccatataatccaggacaaggccaagctataagaaatggagtcaacagaaactcggctatcattggaggcgtcattgctgtggtgattttcaccatcctgtgcaccctggtcttcctgatccggtacatgttccgccacaagggcacctaccataccaacgaagcaaagggggcggagtcggcagagagcgcggacgccgccatcatgaacaacgaccccaacttcacagagaccattgatgaaagcaaaaaggaatggctcatttgaggggtggctacttggctatgggatagggaggagggaattactagggaggagagaaagggacaaaagcaccctgcttcatactcttgagcacatccttaaaatatcagcacaagttgggggaggcaggcaatggaatataatggaatattcttgagactgatcac

SEQ ID NO: 154 - DNA, 1264 bp, Homo sapiens
acttccactcattcaatcctcacaatccatgggccacctgctattatgcttgtcctctttttttttttttttttttttgagacagagtctcgctctgccgcccaggctagagtgcagtggcgtgatctcggcttactgcatatgctagtcctcattttaagatgaggacactgcagcataaaaggaaacttgcccaagatcatgctttggtagggtagggaatcaaagcataatcgtcttgactctaaagctgtgcgtactcttttttgtaaaaacaatcgcaaacttacagaaaagttggaagcatgaaacaaagacttcccctgacctccaattatttgagagtaagttagcaacctgacaccctgtcttccccaaatatcttgtggtgtgttttcaacaaacaaggacattatcctacagagccacaatataaccatcaaaattagaaaaatgggccaggtacagtggttcacacttgtggccctagcactttgggaggccgaggtgggcagatcgcctgaggtcgggggttcgggacaggcctggccggcatggtgaagccccatctctactaaaaatacaaaaagtagctgggcatggtgggacatgcctgtaatcccagctacccgggaggctgaggcaggagaattgcttgaacccaggaggtagaggctgcggtgagccaagatcatgccactgcactccagcctgggcaacagagtgagactccatctcaaaaaaaaattttttttaatgaacattaatacatttcattatctaatctgcagaccccgttcaatgtttgccaactgtcccaacgatgcctttcatagcgaaagaattttcttcacaatcacacattgcatttagttgtcatgtctctagtctttgtcagtctgagatggttcttcagtttttttcttgactttcatgattgccacactataaaagattgttagccagttatctggtagacaatgtctccatttgggtttgaagtttcttcacatatagactcaggttagcatctttggcaggaatatcacagatgggaggttgcattcttctcattgtgtcctatcagggggtgtatatttcagttgttttcatttctaatggtgttacgtggatcactaaatgaagattgtgttgaccagctttcccattgtttccctctttgtaattaataagtgtcttatggggaagtactttgaaactatgtaaatatcctgctactaattaaactcaatttgttcatttt

SEQ ID NO: 155 - DNA, 2855 bp, Homo sapiens
  misc_feature 994: n = a,c,g, or t
aagacacagaacaaggtctgtctcctatagtcactcaagaagtcgatcgagaagttccacatcatcttatcgatcaagaagctactctagaagtcggagcagaggatggtacagcagaggccgaaccagaagccggagcagttcctaccggagttacaaaagtcacaggacgtccagcaggagcagatccaggagcagctcatatgatccccacagtcgatccaggtcctacacctacgatagctactatagcaggagtcggagtcgaagtagaagccagagaagtgacagttaccaccgaggcagaagttataatcggcggtccaggagttgtagatcttatggctctgacagtgaaagtgaccgaagttactctcatcaccggagccccagtgagagcagcagatacagttgaaaacgtccggatacaaattatatcttatttgtaaatatctggcaacttagcttaagaaatgtaatgacagtctgttgttctatttcaatatcagaggtgaatttcaaaaatagacacttcttaattgttactggttcatttacatgtggggagaagaatttaaaatacagatatgtctcctaaaaatatttttatgccacattttacagtagccaactatggaaatgaatttcattttcttgaatcaagaaatcgtgaaatttatctatgtataatttgcaatattattttaagtctatttcactctatcttacgtatcccttagaatacagattctttttgcctgtttttccagttttagcatatatgctgccaagcatagaactgtgaaggagaactgttaaaggcggccaaatatttatatactgattacatagagtcttgtacatatgtgctctaaaaacaaaccacccagaattgatactgttggtaaccaggagtataaggcagtggctctggggttcttaattcattcctaacttctttgatacttcacaggattaggaaagtggtcatcanacatcccacacagtctgtattacttcaggcttgtgggcaaggttaggaagaatcaatcagccttaactataaatacctgcactgtctctgaggacttactattttatgttctttttaatcaataccgatcagaagtttaggttataaaaacaattctacttcatgctttggtgcttggtaatttttggtgcgtctttaagcattactcttatatatcatatattaaataccataaaaatgaaattcagacaaaatcactggcaccaaaaatggtttattctgagctgtcttcactttgactatttggggggcttctctcaagtacagatgtgggttggggtcccctggagcaggcaggattggcagtaagagatattggccactcaagtctactgtgtgtgtgtgtgtgtgtgtgtgtgtgtgtgtgtggttttttttttttaatctttactttgaatttgttccccaagtgtacttaatcaccttagtgccagtttaatccagttatgcacaagaaattcatattggttgcctgatgtagagctcagcaccaccctaccacaggccttgtctggtgtatttgggaagtggaaaagagccctcagttggagggagctgacaacccttggtggagggagggtgcccttgaatgtattaaaactatcacccaaagaaggtatgaaaacagggtaaggtggtcagttgtttgccaggtcaatagacagaaagtacattagaaaacagtacttaggccaaacaaacaatactggatactgaatacaaaacagtatgatttatattaaaggtttccaaaggttgcctgcaaaggagaatattactactagtcagcaggaaaaaaatgcattcagaacccaagcagaaactgccaaatgtaattaggttaagaaaagttacccttgggcagtgtattagttttctattgctgtgtgacaaattaccccaaatttagcagtttaaaaaacaatacccatagcagttctgtagctcatgagtctggcacagtgtggctggattctctgctcagggtcttaaaggctgaaataagggttggcaggacaacattccttcatggaggctctggggaagaatctgcttctaagttcattcaggttgttggcggaatccagttctttgctggctctcagctggaggcccctctctcacctcaaggctgcctgcattccttcttatgtggtcccctccagcttcaaaccagccttcctgctctttctcatgcttcatatctctctcccgtcctcctgttttaggggcatatgattagctcaagcccacagatatattttaaggttgattgtgcgatagaacataattgcaggagtactgtctcatctcatcatattcacgggttctggagattagctcattgaaagggggaggggcattttcaaattctgcctaccacaggcaataactgcccatctcagctgtaggtggaatttttacccagaaaagataggccctagaagcctcatttcttttctccatggaaaaggacagccctctgctgcagcgttcaacttgtgtgtttactgacagagtgaactacagaaatagcttttcttcctaaaggggattgttctacattttgaagttattttttaataaaattgaattatgttgtgtattgtgcttcttaataggaaatgcattattggactgtttttgtaacatcctgtttattgcaaatagctagtatcgttcaaaaactgtataaaatacttttgtacatattagcaatgtctaatttgtatacacttcagttaaatttccctaaaacttgaaaggggaccttgtagaaattaaaatatatacttagtct

SEQ ID NO: 156 - DNA, 3220 bp, Homo sapiens
tctttctgtaggttgcggcacaacgccaggcaaaagaagaggaaggaatttaatcctaatcggtggaggtcgatttgagggtctgctgtagcaggtggctccgcttgaagcgagggaggaagtttcctccgatcagtagagattggaaagattgttgggagtggcacaccactagggaaaagaagaaggggcgaactgcttgtcttgaggaggtcaacccccagaatcagctcttgtggccttgaagtggctgaagacgatcaccctccacaggcttgagcccagtcccacagccttcctcccccagcctgagtgactactctattccttggtccctgctattgtcggggacgattgcatgggctacgccaggaaagtaggctgggtgaccgcaggcctggtgattggggctggcgcctgctattgcatttatagactgactaggggaagaaaacagaacaaggaaaaaatggctgagggtggatctggggatgtggatgatgctgggactgttctggggccaggtataatgactggtctgatgatgatgatgacagcaatgagagcaagagtatagtatggtacccaccttgggctcggattgggactgaagctggaaccagaactagggccagggcaagggccagggctacccgggcacgtctggctgtccagaaacgggcttcccccaattcagatgataccgttttgtcccctcaagagctacaaaaggttctttgcttggttgagatgtctgaaaagccttatattcttgaagcagctttaattgctctgggtaacaatgctgcttatgcatttaacagagatattattcgtgatctgggtggtctcccaattgtcgcaaagattctcaatactcgggatcccatagttaaggaaaaggctttaattgtcctgaataacttgagtgtgaatgctgaaaatcagcgcaggcttaaagtatacatgaatcaagtgtgtgatgacacaatcacttctcgcttgaactcatctgtgcagcttgctggactgagattgcttacaaatatgactgttactaatgagtatcagcacatgcttgctaattccatttctgacttttttcgtttattttcagcgggaaatgaagaaaccaaacttcaggttctgaaactccttttgaatttggctgaaaatccagccatgactagggaactgctcagggcccaagtaccatcttcactgggctccctctttaataagaaggagaacaaagaagttattcttaaacttctggtcatatttgagaacataaatgataatttcaaatgggaagaaaatgaacctactcagaatcaattcggtgaaggttcactttttttctttttaaaagaatttcaagtgtgtgctgataaggttctgggaatagaaagtcaccatgattttttggtgaaagtaaaagttggaaaattcatggccaaacttgctgaacatatgttcccaaagagccaggaataacaccttgattttgtaatttagaagcaacacacattgtaaactattcattttctccaccttgtttatatggtaaaggaatcctttcagctgccagttttgaataatgaatatcatattgtatcatcaatgctgatatttaactgagttggtctttaggtttaagatggataaatgaatatcactacttgttctgaaaacatgtttgttgctttttatctcgctgcctagattgaaatattttgctatttcttctgcataagtgacagtgaaccaattcatcatgagtaagctcccttctgtcattttcattgatttaatttgtgtatcatcaataaaattgtatgttaatgctggaaagaaaaaaagaagaaagaaagaaaccatccctgtccttcagtttataatctagttggagagataagaaacgtacaaaccaaaagataacagaatatctgaagcatgtactcattgtcagatgttccctctgagagcacagaggaggcaaaagcttctgtgggatgtgctagtcggctaaagcttcacagaggaggtggcaattgaaaatgagtcctgaatggggtagggtggttagggaattccatgagacaagacaaggggggcatggtgtgagaaaggcatggaagtaggaaccctcttcctatgacaggagatcattctgcttagagtggagagtgtggagagtgggagtagataattttggaaagctgggtgaagccagttgtggagaattgtttgaatattatcccattgaatacccagagccactaaatctttttttactagaaaataattggggtccatatgaaagtctctattactgagtagtgtcaatgagggtgtggcaaaatggagcctttcacatcctagtggtggccatttggtaatacagatataagccttaaactatgtaaacccttgtcctaaggaagtaattgaataattgcccaaagattgtatgtatgaggctgttcatcccagcactgtctaagctagtaaaaattggaaacaatttaagtatctagcacattggattggttataaagcaaggaatgttcacacagtaggatattataagtatgctgatggaaatctatattgccaggaaaagctattcattatgcgttgtgaagtcagaaagtaaaaaagggtagatagaagtattcgaagtatagttccattttttgagactaataaaacatatgtttaaaaggacactaaaaactggagttatagatatccagatagaaacagtagttatctttgggtagaagaataatgagtgatctttacttttttactttttattcatctttgtgtttttatttatctaaaatgggtattgatttttaggacggttttgaaaaagaaaagtgttgggaatgaagcaagtgattgattggaaaacatactgaatggaagaaatatttagattaaaaatgaggtaggttgaagtttcttctctgaaatgatagataaatggtgaagataaggcttattgtgaggattcagtgaggtaatatatgcaaagtacttacaatgttctggcacatagtaattaattaagaaaatcgagcacccttaattacctagaatgcagggttgttagttttttggttgacttttgttttgctggggcattctgccatgttttagtgtcatttaataaataatagtaacaataaaggttaacatttattaagtg

SEQ ID NO: 157 - DNA, 391 bp, Homo sapiens
ggtggcggagcggcggattagccttcgcggggcaaaatggagctcgaggccatgagcagatataccagcccagtgaacccagctgtcttcccccatctgaccgtggtgcttttggccattggcatgttcttcaccgcctggttcttcgtttacgaggtcacctctaccaagtacactcgtgatatctataaagagctcctcatctccttagtggcctcactcttcatgggctttggagtcctcttcctgctgctctgggttggcatctacgtgtgagcacccaagggtaacaaccagatggcttcactgaaacctgcttttgtaaattacttttttttactgttgctggaagtgtcccacctgctgctcataataaatgcagatgtatagc

SEQ ID NO: 158 - DNA, 4720 bp, Homo sapiens
  misc_feature 4662: n = a,c,g, or t
gtcgattttatgttaatccctagtacatggcctgctgtcaacacccaggacacccaggatatggtctttgctgtttgattttcctcatccccagtctcaaggggaagccaggacaatgagaacagccacttcccatcaggagtcactgcaaggcccccagggtgggatggtggggagataagaaccgtgagagaagttggcacaaaggagttatgggacaaagggtccaagataggcagaaaagaaaatgttgccagtggatggggaagaaaggaagtcggagggctcagacactgagggggacagaacatctccatgtgcagtctcatctcttatagtcagcaacaggtatccacggggagggccctacatcatctgctaccctgaaggatctggaggtaggaggctctgggcggaggtgcagtgaccccgcaggccagccctccaacctcctcccgcagcggggactgggtgcccctctgccagctgagacagcccacacacaacccagccctaatgatcgttctctctacctctcccccaagtcctcctccgcctcctcctctctgcatgcgcctcagagcccgtgccaagaacaagcagcagtcctgaactcgaggtccataaaaatcagtcgactgaatgacaccatcaaatctttgaaacaacagaagaaacaagtggaacatcagctggaagaagaaaagaaagcaaacaatgagaaacagaaagctgaaagggagctagagggtcaaatccagagattgaacacagagaaaaagaaactaaatacggacctgtatcacatgaaacattctctcagatactttgaagaagagtccaaggatctggccggccgcctgcaacgttcatcgcagcgtataggagagttagagtggtctctctgtgttgtcgccgccacacagaagaagaagccggatgggttctcgagccgcagtagagcacttctcaagcggcagttagagcagtccatacgggagcagatactgctgaaaggacacgtgacacagttgaaggagtcgcttaaagaagtccagctggagagagatcaatatgctgaacaaataaaaggagagagggcccagtggcagcagaggatgaggaaaatgtcgcaggaggtttgcacattgaaggaggagaagaagcatgatacgcatcgggtagaggagctggagaggagcttgtccagactcaaaaaccagatggctgagccactgcccccggatgccccagcagtgtcctctgaggtggagctgcaagacctgaggaaggagctggagagagtggcaggagagctccaggctcaggtggaaaacaatcagtgcatcagtctcctgaaccgtgggcaaaaggagaggcttcgcgagcaggaggagaggcttcaggagcagcaggagaggcttcgggaacaggagaagaggcttcagcagctggccgagccacagagcgacttggaggagctgaagcacgagaacaagagcgcactgcagttggagcagcaagtaaaggagctgcaggagaagctgggccaggtgacggagacgctcacctcggctgagaaggagccagaggcagcagtcccagcctcagggactgggggcgagtctagcggccttatggacctcctggaggagaaggcggacctgagggagcatgtggagaaactggaacttggattcatccagtaccggagagagagatgccatcagaacgtacatcgccttctaacagagccaggggacagtgccaaagatgcggcaccgggaggaggccatcatcaggctggcccaggacgaggaggagaggaaggtgaagctgttggagctgcaggagatggtgttgcggcttgtggcagctacagcgaggggcacggcaaattcgtggccgctgcccggaaccctgctgctgaacccagtccaggagccccagccccccaggagctcggggctgccgacaagcatggtgatctttgtgaggcgagcctcaccaacagcgtggagcctgcacaaggagaagccagggagggttcttcccaggacaaccctactgcacagccagtcgtgcagctccttggtgagatgcaggaccaccaggagcacccaggcttgggcagcaactgctgtgtgccatgcttttgctgggcttggctgccgagaagaaggagataaacaccaccatcatcaaagagctgctcaagaaatttttaaaaacgaaacaaagttatggggttaatctcctacacaattcatttacttcatttgaatgttagagctactcatgattatttgtgtttctaatttatagtttaagtttatttgtaaaaagttaaaagagagtgggtctctgtggctctcactgatgttcactctggcatcctttagcatttttcttttttcatttcataattgtaggtcattagcatgcatatcgagtttgcccttacgtggtgggagttcaaacacacaaagacccactctttgcacaaaactgttctcgctggtttggaataggctcccgtgcttttttaatgttattgcagcatggatgttcattacagaattcagataaaatttgctaatgttctgctatgatgtttgatctcatcttaatcacagtgagctcttccatagctcaatatgcggttggccctcaagtgtgcactgtttattactttgtaatatgccactatgagtactgacacttagagctgtttaaaggccgagaactggaaacagcctttcctccattttctgggtattggtgatgggagtgataaccttttgggggagctttctaaatctcacagaagaggaaagtggcctgctctggcaggtatgtgcaggatacagtgtgtttcatctgttccggtgccaagaatgagcactgtactgtggcagttccctttggatttgtatgtgctctgggctcatgaagatactgcatcgtgagctgcagcagttgcactctttttcaatgacctaaaaatggcttatttccgaggaatgaaaggctgccatcattggctgtggatgtggaaaacctttcctagcttagagcatttgtatctacaatacattttaaagtcagagttcatgttccctgttttaatcacatgactacctgtcccagtacacgaaagggcgctggttggcattcttcttaatgtatttagtaaagatcataagacatcctttaagagtttaaatgtctctgaaacaggcatacaggctctagtcaagaatgaattagagtgaaggaaagctgtgtgacacctggcattcctctctgttcatggagcttctttgaggcttgaagtttgattttactatctagacctctctggctaatacctattcttcaaccacctcggttactctgacataggaatttacttcttttcctggagtggaaaacactttagaaaataataacaaacattattataaactaatatatgtgagagtacttagttgaaacaaaaaggaattttagtagacagtattatattatctttgaaaatcaaggagaagtttatgcaacttaaaatgtttacacactgtgctgcaatctactgtttgtgaatgtcaatgtattatcaggaaacatgtctatacgatcgcagagttgtatttcctcacaaacttctttacgaagagtgaaatatgtttttgtacctctcagtttcagtcagggacatattttgtgcaatatttctgtgattgtgcctatgtgtgatgaatgaatgcatttcaatcatacattgcctaaatcataacttgatgatgcttgggaaagaatcaacagttaaaacttcatgaagttctaatgtctgtgttccaacacacatcacattattaggttgtagggagatatgtatgtgtgctccctggagtggggagttttctagttactagaccatctccatttttagcacttggcagcctcatgatccttttataaatgggagattaacaggagagcagcaatacgattttgccaatggaataacagatttgccggcattcactgaaagagggcagatatggggtccttgtgacttcaactgactcttccgaattgtatgaatttatcaatgtattagataaacccagtttcagaataataaagaaaaaatattagaccaaataatgtggctaatagtggtatgatttctagcccgtgggtttaaaactgtatcctaaagagtcattttaaaataatataaatatttaaaaatgtaactgctatctttatgttctgaaataagttaaaacattttaaaatatgaatactgtagtttaaaagaaagaaatggtgggaaggaaaagtagagaaagaaatgccaattccagtccaaagctttgtttgccaagttttcttagaatgaattttaccaatgtatgggttcttgttaacagaatgtgtaacagaaatactgaaagacttttgcctaaagtggcattattgactgctggtgtgatgctactgtaatgcgataaattattaaattgttgcaaagtgctgtttttcccttaaaattttattttgcgcatcttgaaaattatagtattaaaggtattgatactgtgcaaatactgggcatgcttggcatgagataatctgtttcattttcacaaaatngtagtatgagtatgcaagtgtttattaaaagaacacaaaataaaaaaggtatgggatt

SEQ ID NO: 159 - DNA, 779 bp, Homo sapiens
gggaattccgagtgtccagcactgccgtattgccagcacagacggattttctctaatcagtgtccctggggcaggaggatgacccagtcacctttactagtcctttggagacaatttacctgtattaggagcccaggccacgctacactctgcccacactggtgagcaggaggtcttcccacgccctgtcattaggctgcatttactcttgctaaataaaagtgggagtggggcgtgcgcgttatccatgtattgcctttcagctctagatccccctcccctgcctgctctgcagttgtgggtggggcccgtgcgccgtttctccttggtagcgtgcacggtgttgaactgggacactggggagaaaggggctttcatgtcgtttccttcctgctcctgctgcacagctgccaggagtgctctgcctggagtctgcagacctcagagaggtcccagcactggctgtggcctttcaggtgtaggcaggtgggctctgcttcccgattccctgtgagcgcccaccctctcgaaagaattttctgcttgccctgtgactgtgcagactctggctcgagcaacccggggaacttcaccctcaggggcctcccacaccttctccagcgaggaggtctcagtcccagcctcgggagggcacctccttttctgtgctttcttccctgaggcattcttcctcatccctagggtgttgtgtagaactctttttaaactctatgctccgagtagagttcatctttatattaaacttcccctgttcaaat

SEQ ID NO: 160 - DNA, 3655 bp, Homo sapiens
ggcggcggcggcggcagaagcggcggcggcggcggcggcgggagccgaggaggaggttccggacgctgcttaggaaccggggactcaggagtgcccgcgccctgagcgctcagctccagaggcgtcatggctgagtacgggaccctcctgcaagacctgaccaacaacatcacccttgaagatctagaacagctcaagtcggcctgcaaggaagacatccccagcgaaaagagtgaggagatcactactggcagtgcctggtttagcttcctggagagccacaacaagctggacaaagacaacctctcctacattgagcacatctttgagatctcccgccgtcctgacctactcactatggtggttgactacagaacccgtgtgctgaagatctctgaggaggatgagctggacaccaagctaacccgtatccccagtgccaagaagtacaaagacattatccggcagccctctgaggaagagatcatcaaattggctcccccaccgaagaagcctgagcaagggggaggaagaggaggaaggttggaccttcatcagaccactcccttcccccatcctccaggagagggggcaagggcaacccaccatctacccacttactaacctggtcctaacccccttactgtgcgcgtgtgtgtgcgtgtgcgcacgctctggctgtttgtctatatgtctagctcatctagttcctcttcttaaggggatgggggtcaggggctaggggagggggctgagtttccccactttaggaggaggtgggggctatttctatgcaaatagaaatcagcacattcctcctacttccctttcctccactccccccatatctttaaagtgtggaagcagaaaggacctgcattttcctacattgaggagctgacataggggtaaggtatgggagaggtaggtggatccagggaaaagcagtggggacggaaggcaaagagaccactcaacccccacctggaaggggcaaagaaaagccagagttccatgtttgtactcctgtgctggactgtttcctgagtaccagcaggtccctttttgtctctcatgggcctagcataggtatgagccagggatcctttcctggtccctaagatcaaaccccatggagcagccagcgttagatgcccccacccacctgtactctggagagactgtgctgggaacatgtaccactgagcctgagatggggatgagggcagagagaggggagccccctcttccactcagttgttcctactcagactgttgcactctaaacctagggaggttgaagaatgagacccttaggttttaacacgaatcctgacaccaccatctatagggtcccaacttggttattgtaggcaaccttccctctctccttggtgaagaacatcccaagccagaaagaagttaactacagtgttttcctttgcaccgatccccaccccaattcaatcccggaagggacttacttaggaaacccttctttactagatatcctggccccctgggcttgtgaacacctcctagccacatcactacagtacagtgagtgaccccagcttcctgcctaccccaagatgcccctccccaccctgaccgtgctaactgtgtgtacatatatattctacatatatgtatattaaaactgcactgccaaaaaaaaaaaaaaaaaagcggaaaatttgctaagttaatccttctgtatttttgtctcctagagctgcttatcatccagactttccaacagttctgacagctttagaaatagataatgcggttgtggcaaatagcctaattgacatgagaggcatagagacagtgctactaatcaaaaataattctgtagctcgtgcagtaatgcagtcccaaaagccacccaaaaattgtagagaagcttttactgctgatggtgatcaagtttttgcaggacgttattattcatctgaaaatacaagacctaagttcctaagcagagatgtggattctgaaataagtgacttggagaatgaggttgaaaataagacggcccagatattaaatcttcagcaacatttatctgcccttgaaaaagatattaaacacaatgaggaacttcttaaaaggtgccaactacattataaagaactaaagatgaaaataagaaaaaatatttctgaaattcgggaacttgagaacatagaagaacaccagtctgtagatattgcaactttggaagatgaagctcaggaaaataaaagcaaaatgaaaatggttgaggaacatatggagcaacaaaaagaaaatatggagcatcttaaaagtctgaaaatagaagcagaaaataagtatgatgcaattaaattcaaaattaatcaactatcggagctagcagacccacttaaggatgaattaaaccttgctgattctgaagtggataaccaaaaacgagggaaacgacattatgaagaaaaacaaaaagaacacttggataccttaaataaaaagaaacgagaactggatatgaaagagaaagaactagaggagaaaatgtcacaagcaagacaaatctgcccagagcgtatagaagtagaaaaatctgcatcaattctggacaaagaaattaatcgattaaggcagaagatacaggcagaacatgctagtcatggagatcgagaggaaataatgaggcagtaccaagaagcaagagagacctatcttgatctggatagtaaagtgaggactttaaaaaagtttattaaattactgggagaaatcatggagcacagattcaagacatatcaacaatttagaaggtgtttgactttacgatgcaaattatactttgacaacttactatctcagcgggcctattgtggaaaaatgaattttgaccacaagaatgaaactctaagtatatcagttcagcctggagaaggaaataaagctgctttcaatgacatgagagccttgtctggaggtgaacgttctttctccacagtgtgttttattctttccctgtggtccatcgcagaatctcctttcagatgcctggatgaatttgatgtctacatggatatggttaataggagaattgccatggacttgatactgaagatggcagattcccagcgttttagacagtttatcttgctcacacctcaaagcatgagttcacttccatccagtaaactgataagaattctccgaatgtctgatcctgaaagaggacaaactacattgcctttcagacctgtgactcaagaagaagatgatgaccaaaggtgatttgtaacttaacatgccttgtcctgatgttgaaggatttgtgaagggaaaaaaaattctggactctttgatataataaaatgagactggaggcattctgaaatgaaagaaactcctttatatatccaaccacaatcaaacatataaataagcctggaaaaccaactacaaccagcaatttaagattactattactttaagaaaatcaatttcatagtattggttttaaatctttttaagtttttttaatacgatctatttttataggttctttttcagaagtaaaattttgtacatatatacatgtacatatctgtttagtttgggttcatttctataacattttgtaagaaaataaaagtttgagcacctgatt

SEQ ID NO: 161 - DNA, 2310 bp, Homo sapiens
ccattttacatgtttattggctgttgttatttcctttttgagatctgttcgttatatgctttgcccgtttttctgttgggtggttattatttttcttattgaatggtataagctctttgtaagttaaggacattagcccttagtcagatattttgacttaggttttaatttttttccacacagaagttttaagctctgtggcaaatttatcagtcttatatcactacagggttataaatattagttatcacttcgggtttgtgtcttgcttagaaagcctcatttgaagattgtaaatgttagtaagtttccccatattttcctctaggacttccatggtttaatttgttttgtttaaactaggaattggcattcacatcctcttttgtcccaggtctcagaggtcccttgtatcttatagagcagtattgttttatgttattttcccatgtataatttaaaaacaaaatacgttgttcaaaacaaaatacagtggcagcagataatggcagtatctctgtaactgctggtaaactgtatttcatagtgaagtgttcataaactaaagagtcattgatttggtttcctggctaattaaaatctgaattccatttgaagttccattgaaatcatggttttactctatagcagtggatgttttttcccaacctttctgatatttttttccttcctgagacagggtcttgctctgtcacctgggatggagtgtagttgcaccatcaaggcttactgcagtctcaactctctgagctcaagtgatcctgccacctcagcctcttgagtagcaaggattacaggcacctaccactatgcctggctaatttttatattttttgtagagatggattctcactatgttgcccgggctcatcttgaactcgagctcaagcaatctgtccatcttggcctcccaaagtgctgggattataggcgtgagccactgcacctggcccctttctgattattttaatctatctttaaatgttcaaagtgatttgcctaattcatttaaagcatatttagttttttttaaattgagtgtattttatctagatatttttaaaaggcagcatctaaccttggattttataaatacatctaaatttgttatttccagaatgcttcaaaacagatctctgtagcctcgtgctttgttattgttaggttttttttttttgttttgagacagggtcttgctctatctggagtgcagtggcacagtcatagctcactgtaccctcaaactcctaaactcaagtaatcctcccatctcagcctcctgagtagttgggaccacagtcatgcaccagcatgcctggctaattttttaaattttgttcttaatagagacagagtcttgctgtgttgttcaggctggtctcaaactcctgggctcaagcgatcctcccacctcagcctcctaaagtgctgagattacggatgtgaatcattacacccagcctattaatggttttgtatagcaagtcttttgtgggtggtggaaagatgaagtgctgtgaaatattgtaggagcagaaacttgaaatgtggcaaaaaccacatgggcaaaatttctgtctcttttcttatttttgcttttttgtttaaaggtttttctattgggaaagctactgatcggatggatgctttcaggaaagcaaagaacagagcagttcaccatttgcattatatagaacgatatgaagaccatacaatattccatgatatttcattaagatttaaaaggacgcatatcaagatgaagaaacaacccaaaggttacggcctccgctgccacagggccatcatcaccatctgccggctcattggcatcaaagacatgtatgccaaggtctctgggtccattaatatgctcagcctcacccagggcctcttccgtgggctctccagacaggaaacccatcaacagctggctgataagaagggcctccatgttgtggaaatccgggaggaatgtggccctctgcccattgtggttgcgtccccccgggggcccttgaggaaggatccagagccagaagatgaggttccagacgtcaaactggactgggaagatgtgaagactgcacagggaatgaagcgctctgtgtggtctaatttgaagagagccgccacgtaacctctctggccttgtgcagccagttcctgtgctgccctgcacctaggagagactcagcccctcacagcttgggatgttaccttgccttttgtttgttttgagggaagtttaatctttaaactctttggaaataaataattatagctttc

SEQ ID NO: 162 - DNA, 3842 bp, Homo sapiens
gggttggttagagatacagtgtgggtggtgggggtggtaggaaatgcaggttgaagggaattctctggggctttggggaatttagtgcgtgggtgagccaagaaaatactaattaataatagtaagttgttagtgttggttaagttgttgcttggaagtgagaagttgcttagaaactttccaaagtgcttagaactttaagtgcaaacagacaaactaacaaacaaaaattgttttgctttgctacaaggtggggaagactgaagaagtgttaactgaaaacaggtgacacagagtcaccagttttccgagaaccaaagggaggggtgtgtgatgccatctcacaggcaggggaaatgtctttaccagcttcctcctggtggccaagacagcctgtttcagagggttgttttgtttggggtgtgggtgttatcaagtgaattagtcacttgaaagatgggcgtcagacttgcatacgcagcagatcagcatccttcgctgccccttagcaacttaggtggttgatttgaaactgtgaaggtgtgattttttcaggagctggaagtcttagaaaagccttgtaaatgcctatattgtgggcttttaacgtatttaagggaccacttaagacgagattagatgggctcttctggatttgttcctcatttgtcacaggtgtcttgtgattgaaaatcatgagcgaagtgaaattgcattgaatttcaagggaatttagtatgtaaatcgtgccttagaaacacatctgttgtcttttctgtgtttggtcgatattaataatggcaaaatttttgcctatctagtatcttcaaattgtagtctttgtaacaaccaaataaccttttgtggtcactgtaaaattaatatttggtagacagaatccatgtacctttgctaaggttagaatgaataatttattgtatttttaatttgaatgtttgtgctttttaaatgagccaagactagaggggaaactatcacctaaaatcagtttggaaaacaagacctaaaaagggaaggggatggggattgtggggagagagtgggcgaggtgcctttactacatgtgtgatctgaaaaccctgcttggttctgagctgcgtctattgaattggtaaagtaataccaatggctttttatcatttccttcttccctttaagtttcacttgaaatttaaaaatcatggttatttttatcgttgggatctttctgtcttctgggttccattttttaaatgtttaaaaatatgttgacatggtagttcagttcttaaccaatgacttggggatgatgcaaacaattactgtcgttgggatttagagtgtattagtcacgcatgtatggggaagtagtctcgggtatgctgttgtgaaattgaaactgtaaaagtagatggttgaaagtactggtatgttgctctgtatggtaagaactaattctgttacgtcatgtacataattactaatcacttttcttcccctttacagcacaaataaagtttgagttctaaactcattagaattgttgtattgctatgttacatttctcgacccctatcacattgccttcataacgactttggatgtatcttcatattgtagatttaggtctagatttgctagctccaagtaattaaggccatgtaggagagcatggtaaccacagatagaactggtattatcccaagtggtctgcagactgctgagtggggatgggatctgctctctgttgagagttggtaatcattggtttgaaatgtgatgaaaccactcaagccaatgaaggtgggtgtgtaggtggggagtactttgccataatattttaaaacattacctggttagagttctaagtggtacttatttttgtttggttaggggaaagcctgaataaaaacagaaatggacacataatatgcatattccatagtctttgggaggctggaatgtgcctgggatttgggtctaagtgtatgcgtaattcttacctcactaaagaatttgccttgtttttttccttttggtgagtgactaaaacgtctgggcttccctgtgtgcgtgctacagtaagcaagcagaggctgtgcaaaggtgtgagcaggatcacgtggaatctggaggatacatcttggcttgcaaactgcctctgtctcctgggtgggactgttctgtccttgcactgctgttctgtgttacctcttggggtgtaaggttttgcttacaggagacaaactttgggcgtagaatggaagccactgccagcctctgtgctgagaaggaaggtgcttgtttcaaagggagcagcaagggaggcttgttctactcacctgggcctgtttgcctgagaaggggagataagggctgaactgggactagccagggggaccaacacaaatggtgggggatcatgacctgaaggattctttccttcccatgagctgcagggctggttgccgtccttgcaactgtgtcttatttgcctgtgccgttatatcttggtgacccctccacgtgtacactactgacaaacgggtggagtgctggggagaagtcactgtgccgcccacctagtaaaccttctgtctgtgctcatggcatctccaagatggggcactgctgtgtgcagaatccagggtcctctttctgcttgcaactcctttccctggatgccccagaaacaatccaggcctcctttcctatcttacccctttgctttgctttttaccccagcacctctataaccgccttctcttcttttcagaactccttgtttctcgtcctgttttttatgattacaaaactcttgcttccaccctggaagataactgctatagatgcctgtatgtaaatggtgctgtctccagcaactggcatgctgaagaagaattgattcacggggtataaatgttggggattggaagtggggatgaaatggcacttgttgatacaggagcagagaggtgaggccgactgctgaagacagctcgccaccctccttgcctccactccaatccaggggctggggccacattctttgccttcatttatcctcagatcaggtgagatcgacaggaggtgttgatggcagtgccagcaattattgctaatccgtttgcatccttatgcatagatctgaattcagactttgtgaatttccagaggtgtgggtaatataatagaattcagtgagtgggcatggctgatcttgtgcaaattaaaagttatggggcataagaatagcaaaagttgaacttcttttaaaaaggaaagtaccctgagagccagtattggttgaggctcttcagtatgcccaggttggcagcactgagaaccgcaggaacggcctgttgttacaaaaaggagattgactcagctgcccttggtgcatctgactgactatgactgctgagagattccaaggacccttaatgccagggctaacctctccatgtgcagtgagacctctggaggaagtgtcatcctctggctttgtgtggtactcattatggtgcagtgcgggcatgaaatgaagacacccaaataggcttacagatacgatatgttttaaatgttcgtatttaacaaaaacatactgacactgtttggaaatggcaacaggaagatagcaaaatgaatactaacattacgaaaagatgaacaggtacatgttccaaggcaggtggctgtgaacttcctctgagtgaaggcatcccctccagcacctttcagcttgctagttaggacgacccgccgccaccctccaggacctccagccctgcactgcctttcctctcttttaaataattcttcattgagttctaatatgt

SEQ ID NO: 163 - DNA, 1856 bp, Homo sapiens
gattagtctgaagccgccaccagccccaggcccccgtgcagaagaaaagcgggagggaacggcggaggccgccgctgccctgcaccgccctcctggaggccacttggagagtccggccccgaggaggccatggccacaagtgcccacagctggccccaggttgccagcgtcgctacagcccagaccaaggcagaataatctccggatgagctggtggcaccgctgagcctttggtctcaccagggcttcctgttgctggcaggcggggtggagcggagctgctgggaggctgctggataggagaggggtcacggctgcggaagaggaggttcttcgggacacccgtggatggacacggcaaggaaacaccaggccaaccacagctggggataaaatagcacaaccacaccctgccgtccagcgcctcccagcctgtgccccttcctagtaccaccagcaaccatcaatcccgtctcctcctgcctcctctcctgcaatccaccccgccacgactatcgccatggcagccctgatcgcagagaacttccgcttcctgtcacttttcttcaagagcaaggatgtgatgattttcaacggcctggtggcactgggcacggtgggcagccaggagctgttctctgtggtggccttccactgcccctgctcgccggcccggaactacctgtacgggctggcggccatcggcgtgcccgccctggtgctcttcatcattggcatcatcctcaacaaccacacctggaacctcgtggccgattgccagcaccggatgaccaagaactgctccgccgcccccaccttcctccttctaagctccatcctgggacgtgcggctgtggcccctgtcacctggtctgtcatctccctgctgcgtggtgaggcttatgtctgtgctctcagtgagttcgtggacccttcctcactcacggccagggaagagcacttcccatcagcccacgccactgaaatcctggccaggttcccctgcaaggagaaccctgacaacctgtcagacttccgggaggaggtcagccgcaggctcaggtatgagtcccagctctttggatggctgctcatcggcgtggtggccatcctggtgttcctgaccaagtgcctcaagcattactgctcaccactcagctaccgccaggaggcctactgggcgcagtaccgcgccaatgaggaccagctgttccagcgcacggccgaggtgcactctcgggtgctcgctgcaacaatgtgcgccgcttctttggctttgtggcgctcaacaaggatgatgaggaactgattgccaacttcccagtggaaggcaggcagccacggccacagtggaatgccatcaccggcgtctacttgtaccgtgagaaccagggcctcccactctacagccgcctgcacaagtgggcccagggtctggcaggcaacggcgcggcccctgacaacgtggagatggccctgctcccctcataaggagtgcttcccatgctatttggtaaatggcagtgattggtcccattctgaaccccactgcttgctcacatccatatcagaaggggatttttaaaaaactgttatcttcttggccaggggaaaggaccactaggcaatctggggtgtggacagacccagtagacaatggaagccccagccagctgggccaggtgacagtgaagctcaccagtgggctcatttatggtactatatgcagttaacatgtatctagctgcatagggacacccagcgcagcagtgcaccactgggaagtggcctccagtgcagcctctggccttattttatatatttaaatttttgataaagtttttcttactaaaagg

SEQ ID NO: 164 - DNA, 2868 bp, Homo sapiens
agcaggtctcagtggcccttagcagcagctccattcgtgtggccatgctggaggaaaatggggagcgcgtcctcatggaagggaagctcacccacaagatcaacactgagagttctctctggagtctcgagcccgggaagtgcgttttggtgaacctgagcaaggtgggcgagtattggtggaacgccatcctggagggagaagagcccatcgacattgacaagatcaacaaggagcgctccatggccaccgtggatgaggaggaacaggcggtgttggacaggcttacctttgactaccaccagaagctgcagggcaagccacagagccatgagctgaaagtccatgagatgctgaagaaggggtgggatgctgaaggttctcccttccgaggccagcgattcgaccctgccatgttcaacatctccccgggggctgtgcagttttaatgaccagaaggaaaggaaaccctcgccggtggggaggcagagccttatcctcggctgcccttcttggctccctgcattccagggacttgctcgtcttgtttacccctagccatcctttctttcaagggtgaaccaggccttccaccctgaccttgcatctccagactgttccagagaaggtgcggggccagctgctatgtggtggccgctgtggctgacactgagtgaaggtgtttgaaatgcaggagaggatatcccagcaaattgggatcacatgcttttgtctccacagcaaccagccactgcaggcagcatgtctttcctcccctgctctctgcttgctgttgttttgacgctattctgcttgcatgtcttctggttgggatgtggagttgttgctggactctcaggcgaagctgaagtcattgaagtgtgtgaagctctgtgcttgcatgagggcaagcaaggaatggctgtgcctgaggctgctctgggaaactccttgccccttgacctcttttgagagcattcacgtggtcttcttgctcatccccttataaatgtgctttgcctgcctcagcctcatggtcagagcagtggagactggagccctgtttgcacgttctagttgttcggagaaagcctaggttctgggctcaggtccagatgcagcggggattctgttctctgactgtggcgaccttgctttggttcttgttgaagtgaaccaagcccggccaccacgcatggcatgctgtgcttggctccccataagacgtcctctttgggtgcacggtgtcaaagtgtgggcaggagtggagagctggtgccctcaggaggagaccacagcatgtccatcagctcagcagagctcgacagccacaagtcctgagaagctttgaccttgaagggcttctgggagaggaggaatttctgcatggggcgtgaaggcacactgtcccaccacaactgaaccagaagagagtgaagactcccctcttcccatcctctgtgccaggtgccagactgtgctccttggaacttatggcccaatcttacctgttctccagggactggtcactgcctcaggacccccaagcctatgccctgagccatggctgctgactgactccagccaaggtgcaaagacgagattatgagacaggtcctcaggcctgtgttccaagtactcacaggggctctgggtgcccatcgccgggagtatggttcagctgccaccggcactgtccatttgcctgtctgtcaagctcagagcatggataagccacacagcagggcagtgcaccctggcaccatgcacggccagcaagaatcaaggcccgcagatgctaagagggcctattgtcaggggaaggtccccgctcctgcacactctctatggatacttgggttgtgggggctctcttggagagtaagtttgtggtttgtttctggtttacagtggtggctgacaccccttgtaagaaagcattcctgggaagtcttctgtgggtccaaacatgttgctccgatcatcacaggagagcaaaaggccctagataccccctttggaatgtgagattcttgttgtctgatatttgccactgagctggtgaagcccctctaaagagatctcgaccctggggagcagaattcttgtcatctatgaggggtcctgagaaagacttgtcattttttttcctggagttcttcccattgaggtcctaggatttgcacaccactgtcccacaagagctttcctgcctaatgaaaggaggtcttgtggtgtgtgtctcctctcttctctatagttcccgagttggcccccattgcagcccccaccctgtgggtagtcttccagaagtgatgcagtggtgtgagatgccctacaccttgttatttgggagactttgagagtcattcacttccatggtgactagtgtttgttttgcctgattttatattctgtgttgcatttctccccactccctgccctgctttaataaacagcaaaccaatatctaggaagaatgactgagggatagtattgggtattggccccatggcaggaacagccacttgcatctggtcccggtgccacactgcggtgcttggtgtggttgtggagcctgtccctgcgcgccttgctcccgttgagccacgctgtctggtgggtgattctctgccctgagccaccaccctggactggcccagtctccagagctggcacaccctgcctgttttctctttttagacacaacagccgcagtttggccagccactaagtcccaccagctgaggtccgaggaaagcggggtgactcatttcccttgtccagggcccgaggagagtgaggtgtccagcctgcaaagctattccagctccttggtgttggtttgcaataaattggtatttaagc

SEQ ID NO: 165 - DNA, 3007 bp, Homo sapiens
  misc_feature 1704,1905: n = a,c,g, or t
attcttcccaggattcaggagcagttccagaaaaatcccgacagttacaatggtgctgtccgagagaactacacctggtcacaggactatactgacctggaggtcagggtgccagtacccaagcacgtggtgaagggaaagcaggtctcagtggcccttagcagcagctccattcgtgtggccatgctggaggaaaatggggagcgcgtcctcatggaagggaagctcacccacaagatcaacactgagagttctctctggagtctcgagcccgggaagtgcgttttggtgaacctgagcaaggtgggcgagtattggtggaacgccatcctggagggagaagagcccatcgacattgacaagatcaacaaggagcgctccatggccaccgtggatgaggaggaacaggcggtgttggacaggcttacctttgactaccaccagaagctgcagggcaagccacagagccatgagctgaaagtccatgagatgctgaagaaggggtgggatgctgaaggttctcccttccgaggccagcgattcgaccctgccatgttcaacatctccccgggggctgtgcagttttaatgaccagaaggaaaggaaaccctcgccggtggggaggcagaaccttatcctcggctgcccttcttggctccctgcattccagggacttgctcgtcttgtttacccctagccatcctttctttcaagggtgaaccaggccttccaccctgaccttgcatctccagactgttccagagaaggtgcggggccagctgctatgtggtggccgctgtggctgacactgagtgaaggtgtttgaaatgcaggagaggatatcccagcaaattgggatcacatgcttttgtctccacagcaaccagccactgcaggcagcatgtctttcctcccctgctctctgcttgctgttgttttgacgctattctgcttgcatgtcttctggttgggatgtggagttgttgctggactctcaggcgaagctgaagtcattgaagtgtgtgaagctctgtgcttgcatgagggcaagcaaggaatggctgtgcctgaggctgctctgggaaactccttgccccttgacctcttttgagagcattcacgtggtcttcttgctcatccccttataaatgtgctttgcctgcctcagcctcatggtcagagcagtggagactggagccctgtttgcacgttctagttgttcggagaaagcctaggttctgggctcaggtccagatgcagcggggattctgttctctgactgtggcgaccttgctttggttcttgttgaagtgaaccaagcccggccaccacgcatgggctgtgcttggctccccataagacgtcctctttgggtgcacggtgtcaaagtgtgggcaggagtggagagctggtgccctcaggaggagaccacagcatgtccatcagctcagcagagctcgacagccacaagtcctgagaagctttgaccttgaagggcttctgggagaggaggaatttctgcatggggcgtgaaggcacactgtcccaccacaactgaaccagaagagagtgaagactcccctcttcccatcctctgtgccaggtgccagactgtgctccttggaacttatggcccaatcttacctgttctccagggactggtcactgcctcaggacccccaagcctatgccctgagccatggntgctgactgactccagccaaggtgcaaagacgagattatgagacaggtcctcaggcctgtgttccaagtactcacaggggctctgggtgccatcgccgggagtatggttcagctgccaccggcactgtccatttgcctgtctgtcaagctcagagcatggataagccacacagcagggcagtgcaccctggcaccatgcanggccagcaagaatcaaggcccgcagatgctaagagggcctattgtcaggggaaggtccccgctcctgcacactctctatggatacttgggttgtgggggctctcttggagagtaagtttgtggtttgtttctggtttacagtggtggctgacaccccttgtaagaaagcattcctgggaagtcttctgtgggtccaaacatgttgctccgatcatcacaggagagcaaaaggccctagataccccctttggaatgtgagagtcttgttgtctgatatttgccactgagctggtgaagcccctctaaagagatctcgaccctggggagcagaattcttgtcatctatgaggggtcctgagaaagacttgtcattttttttcctggagttcttcccattgaggtcctaggatttgcacaccactgtcccacaagagctttcctgcctaatgaaaggaggtcttgtggtgtgtgtctcctctcttctctatagttcccgagttggcccccattgcagcccccaccctgtgggtagtcttccagaagtgatgcagtggtgtgagatgccctacaccttgttatttgggagactttgagagtcattcacttccatggtgactagtgtttgttttgcctgattttatattctgtgttgcatttctccccactccctgccctgctttaataaacagcaaaccaatatctaggaagaatgactgagggatagtattgggtattggccccatggcaggaacagccacttgcatctggtcccggtgccacactgcggtgcttggtgtggttgtggagcctgtccctgcgcgccttgctcccgttgagccacgctgtctggtgggtgattctctgccctgagccaccaccctggactggcccagtctccagagctggcacaccctgcctgttttctctttttagacacaacagccgcagtttggccagccactaagtcccaccagctgaggtccgaggaaagcggggtgactcatttcccttgtccagggcccgaggagagtgaggtgtccagcctgcaaagctattccagctccttggtgttggtttgcaataaattggtatttaagcagtt

SEQ ID NO: 166 - DNA, 1942 bp, Homo sapiens
ctgtgtgtaggagggatttcggcctgagagcgggccgaggagattggcgacggtgtcgcccgtgttttcgttggcgggtgcctgggctggtgggaacagccgcccgaaggaagcaccatgatttcggccgcgcagttgttggatgagttaatgggccgggaccgaaacctagccccggacgagaagcgcagcaacgtgcggtgggaccacgagagcgtttgtaaatattatctctgtggtttttgtcctgcggaattgttcacaaatacacgttctgatcttggtccgtgtgaaaaaattcatgatgaaaatctacgaaaacagtatgagaagagctctcgtttcatgaaagttggctatgagagagattttttgcgatacttacagagcttacttgcagaagtagaacgtaggatcagacgaggccatgctcgtttggcattatctcaaaaccagcagtcttctggggccgctggcccaacaggcaaaaatgaagaaaaaattcaggttctaacagacaaaattgatgtacttctgcaacagattgaagaattagggtctgaaggaaaagtagaagaagcccaggggatgatgaaattagttgagcaattaaaagaagagagagaactgctaaggtccacaacgtcgacaattgaaagctttgctgcacaagaaaaacaaatggaagtttgtgaagtatgtggagcctttttaatagtaggagatgcccagtcccgggtagatgaccatttgatgggaaaacaacacatgggctatgccaaaattaaagctactgtagaagaattaaaagaaaagttaaggaaaagaaccgaagaacctgatcgtgatgagcgtctaaaaaaggagaagcaagaaagagaagaaagagaaaaagaacgggagagagaaagggaagaaagagaaaggaaaagacgaagggaagaggaagaaagagaaaaagaaagggctcgtgacagagaaagaagaaagagaagtcgttcacgaagtagacactcaagccgaacatcagacagaagatgcagcaggtctcgggaccacaaaaggtcacgaagtagagaaagaaggcggagcagaagtagagatcgacgaagaagcagaagccatgatcgatcagaaagaaaacacagatctcgaagtcgggatcgaagaagatcaaaaagccgggatcgaaagtcatataagcacaggagcaaaagtcgggacagagaacaagatagaaaatcccaggagaaagaaaagaggggatctgatgataaaaaaagtagtgtgaagtccggtagtcgagaaaagcagagtgaagacacaaacactgaatcgaaggaaagtgatactaagaatgaggtcaatgggaccagtgaagacattaaatctgaagtgcagcgtaagtatgcacagatgaagatggaactaagccgagtaagaagacataccaaagcctcttctgaaggaaaagacagtgtagtcctgcaaaacattttgaggactactgttcgaagatttttggaagaatactgagaacggcataaagtgaagatcgacatttaaaaaatgaggtgaaagaaagctatagtggcatagaaaaagtataaagctcagttagtttttttattattattattattaaaagttaattcaggactgatgtgacctaccagatttcagaacatgtgttaatagtatatatgccactgaaaacttaggtcctgtatcatacttttttctttaagactttttaagaaatattacttaaacatgtggcttgctcagtgtttaattgcaagttttcaatcttggactttgaaaacaggattaaacgttagtattcgtgtgaatcagactaagtgggatttcatttttacaactctgctctacttagcctttggatttagaagtaaaaataaagtatctctgactttctgtt

SEQ ID NO: 167 - DNA, 1359 bp, Homo sapiens
ggcaatggactgtcgtcgttgttctacagtaagctcatcatcagaatcactatagtattttgagtaaagatatggtttgtggacatacgcatgccgtacactttttgtttttccttcactagaatcactagtttgagtttttgttttattctgtttgttcttctcttcatcatctgacgtaatctctccttcttccatgctatcagacattacaacttcctcctcagtatcttcttcaaaagatgaaaggtcactggtatgaacagagctaactgtgatgtctgtaagtccatccacatcagaatctatcaaagagaaatcttcttttgtcccttcaacagttttagctttattactgttcttttctgaaggaagttttaaactctctacttctttttcctttgcttgtttttcatctttaactttctgtgtatcttcactcttttttgagtgatcaaatttcttttcagtcttttccttcttttctttctttctttctcctttctcattgctgtctggcttcttttcacctttgtctgttgatttatttttttgctcactgctttcctgttgaacatccttatttagcagaattaaattattatgctcttttgtgtaatttttaatttcttcgactggacaggggaggtcgctgaactcttcagactttggggctgtttccagtccttcacctccagagtcagctgtagatttttctttatcagccatgtcctctgaagttctttctttgtcagtactagtatcagtggttggctgagatggaagtttttttgacgctctctcactggtcttggcatttgatgtttctgttgaagccctagcagcactggcttcttggttaagagaagttatggtttccaatatcgacatggcatcattggctacattagcactgggcccaggagtaggaacaccttgtgtaataagggaagtgtctggtttctcatcatcgggagctgtgttgccacttccttcctctttgtgatttagcgtggccaaaaactcatgcacagctttctctacctgaggtctgaatgtgtggttgatctttgggtccacaacctgagaaataattcggtcaataccagactccaacattcctgatttgaggacttgttgtctaatgttgtttcttagctggttcttattgagatgcggactccatgtgtgagttgccaagtgatttgcaacaaagttgtcaacacgctgtctcagattctgatacgcaggcttggtgtccacgtcggccaggcagtctctgcggaactggtcgaagagcccctggctcttgaggtggttcacgatcatggccacgagctgcgattgaattctagacct

SEQ ID NO: 168 - DNA, 2961 bp, Homo sapiens
ggcatggctattgcaccttgggagaagcctttaatcggttagacttctcaagtgcaattcaagatatccgaaggttcaattatgtggtcaaactgttgcagctaattgcaaaatcccagttaacttcattgagtggcgtggcacagaagaattacttcaacattttggataaaatcgttcaaaaggttctttgattaagcgaggattgtggtggtcatcaagaaccttttcccgattgaattctagacctgcggggtagttgcctttggccaaaccaaggacatcatcaggcagatcctgcaggctgatggacttcgcggcttctatcgaggctatgtggcttcactgcttacctatatcccaaacagtgctgtctggtggcccttctatcacttctatgcaggttgagggcaagaactccatcatcctgaccttcagacagctgatggcagaagaagggccttggggcctcatgaagggcctctcggccagaatcatctcagccacaccttccaccattgtcattgtggtgggctatgagagcctcaagaaactcagcctccgacctgagctggtggactcgagacactggtaaccagtggtggggagagaagcctgctgttttccacactaccgtgggtcaggggcagagtggagaggacagcaccctctccaggtgctcccaccacacacccagccctgccctgggccaagtggcctatctgggatagggatagagactttgaactgctcttgctgaagaggctccacgcctggatcccttgcccccactatttaaaattctcttctgagctgggctccctcactcagtccctgtatttgatactggcctaaagaccccaccccccaccctgccagcccttcttctggcttccccttccatctgtgtccctgagaccctgagaagagctgtacatagagcttgcttactaccactggttcttcctcttgggctttcagcccagactccaagcagctgctatcaaccctctctcccttcatctcttagccttgcttatttttattttgggaccgagctgcccactagatgactctgcttttccctgcatttggggctaaggtgccaggtacttatttgcacagggagcaggagcagcaaaaaatctctggttctccagagcactcgtcctctctttggaggggttattaggttgggagaaatgttgatacttttgttttgtgtgtgtgtgtgtgtgtgtgtgtgtgtgtgtgtgtgtgtgtgtgttttaacatctgtgaaccaggctattagtcctgctaaagcgccaatcctgctgtcagagctcacccccttcctaagacaggtagaaaaatgtaatgtatctttttccacaagccacttccctgtcccttcagtctcaggagccctaagagagtctaagctggggcatcccctggcccagaggactcccgtggtgggcacagttctaagtggatcaggctgtcttgggtgcactggacttggagcactaccttgagaagtcaggttgagaaagtagttgatctagaaggcaacaagtgggcatgtgttccccagcacattacccaggccagcagagccaaacctaggagagggcagtgggtagattctctgccccaggcagccatgacatacacataaataccccaatcactcagacttacggcaacaagtgttgtctcactatggtgatctctaagatccacatcactggatgcgtagtcatcccagtcatggtaccctgtggaggaatgctggaagaacataaagagcagttcagaaagtcacccaataccaggaccactgcatttaccagcctgatactgccaagattatctgatgctctcctcaggagctaggagaggagtgctccttcctccctaccgctactctccccaagcctgtgttgcaggtagagaggtgcagcaaatagagaaggcatgtcaaaccctgcatttctacctgagacgtgtgacctggatgatcctccaaaccctattggtcccaccccctgggaaaggccatggtgccagtttgaaaggtgctagctacctgaagccttgatatttcttcatggctgccgcacattcttccaccttggccagaacaggttctgaaaaccacttctctaccttcaccaccaccactgcccatcttgatctctttgagggttttcccatttcacttgatcttatttttgtttatcccttcctgcactttgtcaagagagtcctccagtttctatccaggaatgttcacatccaaagggttggacccacggatcattctgaatcttcctgcccctcctcactgcttaaccctgagaaccacaaatataatggaagcagttccccccaccctcaccccatctctttaagctcatcctagcaagacctctagagaccctagagactcgactttagtccttccccgccatggcacagtggggaaggtgtcaatggggagtgtcacggacaggaggtaggatcctgccgctcgcgtcttagtgtttctccctcaagactttccttctgttttgttgtcttgtgtagtattttacagcccctcttgtgtttttctttatttctcgtacacacacgcagttttaagggtgatgtgtgtataattaaaaggacccttggcccatactttcctaattctttagggactgggattgggtttgactgaaatatgttttggtggggatgggacggtggacttccattctccctaaactggagttttggtcggtaatcaaaactaaaagaaacctctgggagactggaaacctgattggagcactgaggaacaagggaatgaaaaggcagactctctgaacgtttgatgaaatggactcttgtgaaaattaacagtgaatattcactgttgcactgtacgaagtctctgaaatgtaattaaaagtttttattgagcccccg

SEQ ID NO: 169 - DNA, 2162 bp, Homo sapiens
ggcaaaatgcatgacagtaacaatgtggagaaagacattacaccatctgaattgcctgcaaagccaggttgtctgcattcaaaagagcattctattaaagctaccttaatttggcgcttatttttcttaatcatgtttctgacaatcatagtgtgtggaatggttgctgctttaagtgcaataagagctaactgccatcaagagccatcagtatgtcttcaagctgcatgcccagaaagctggattggttttcaaagaaagtgtttctatttttctgatgacaccaagaactggacatcaagtcagaggttttgtgactcacaagatgctgatcttgctcaggttgaaagcttccaggaactgaatttcctgttgagatataaaggcccatctgatcactggattgggctgagcagagaacaaggccaaccatggaaatggataaatggtactgaatggacaagacagttagtcatgaaagaagatggtgccaacttgtatgttgcaaaggtttcacaagttcctcgaatgaatccaagacctgtcatggtttcctatcctgggagcaggagagtgtgcctatttgaatgacaaaggtgccagtagtgccaggcactacacagagaggaagtggatttgttccaaatcagatatacatgtctagatgttacagcaaagccccaactaatctttagaagcatattggaactgataactccattttaaaatgagcaaagaatttatttcttataccaacaggtatatgaaaatatgctcaatatcactaataactgggaaaatacaaatcaaaatcatagtaaaatattacctgttttcatggtgctaatattacctgttctcccactgctaatgacatacccgagactgagtaatttataaataaaagagatttaattgactcatagttccacatggctggggaggtcttgcaatcatgacagaaggcaaatgggaagcaaagtcatgtcttatgtggtggcgggcagggggacttgtgcacaggaactcctatttatacaaccatcagatatcttgagacaagaacagtatggggctccctggtgtgattccgtcctgcgcggctgttctctggagcagcattcatttatcttcgtctgccttgtctcctacctaagtgtgtgtcgccacccgatggaagatttgatggacatggacatgagccccctgaggccccagaactatcttttcagttgtgaactaaaggccgacaaagatgatcactttaaggtggataatgatgaaaatgagaccagttatctttaagaacggtcagctcaggggctggtgcaaaggatgaactgcacattgttgaagcagaggccatgaatgacgaaggcagtccaattaaagtaacactggcaactttgaaaatgtctgtacagccaacggtttctcttgggggctttgaaataacaccaccagtggacttaaggttgaagtgtggttcagggccagtgcatattagtggacagcacttagtagctgtgaaggaaggtgcagagtcagaagatgaagaagaggaggatgtgaaactcttaagtatatctggaaagcagtctgcccctggaggtgggcagaaaaaagtaaaacttgctgctgctgctgctgatgatgatgatgaagatgatgatgatgatgatgacgaggaagctgaagaaaaagcgccagtgaagaaatctatacgagatactccagccaaaaatgcacaaaagtcaaatcagaatggaaaagactcaaaaccatcatcaacaccaagatcaaaaggacaagaatccttcaaaaaacaggaaaaatctcctaaaacaccaaaaggatctagttctgtagaagacattaaagcaaaaatgcaagcaagtatagaaaaacgtggttctcttcccaaagtggaaaccaagttcatcaattatgtgaagaatttcttctggatgactgaccaagaggctattcaagatctctggcagtggaggaagtctctttaagaaaatagtttaaacaatttgttaaaaattttccatcttatttcatttctgtaacagttgatatctggctgtcctttttatagtgcagagtgagaactttccctaccatgtttgataaatgttgtccaggttctattgccc

SEQ ID NO: 170 - DNA, 1613 bp, Homo sapiens
gacacctcttggagtccacttggcatgattacccgttgagccacatattggaaaaatgattctttttggagcactgttctgctgcttagacccagtactcactattgctgctagtctcagtttcaaagatccatttgtcattccactgggaaaagaaaagattgcagatgcaagaagaaaggaattggcaaaggatactagaagtgatcacttaacagttgtgaatgcgtttgagggctgggaagaggctaggcgacgtggtttcaaagatccatttgtcattccactgggaaaagaaaagattgcagatgcaagaagaaaggaattggcaaaggatactagaagtgatcacttaacagttgtgaatgcgtttgagggctgggaagaggctaggcgacgtggtttcagatacgaaaaggactattgctgggaatattttctgtcttcaaacacactgcagatgctgcataacatgaaaggacagtttgctgagcatcttcttggagctggatttgtaagcagtagaaatcctaaagatccagaatctaatataaattcagataatgagaagataattaaagctgtcatctgtgctggtttatatcccaaagttgctaaaattcgactaaatttgggtaaaaatagaaaaatggtaaaagtttacacaaaaaccgatggcctggttgctgttcatcctaaatctgttaatgtggagcaaacagactttcactacaactggcttatctatcacctaaagatgagaacaagcagtatatacttgtatgactgcacagaggtttccccatactgtctcttgttttttggaggtgacatttccatccagaaggataacgatcaggaaactattgctgtagatgagtggattgtatttcagtctccagcaagaattgcccatcttgttaaggaattaagaaaggaactagatattcttctgcaagagaagattgaaagtcctcatcctgtagactggaatgacactaaatccagagactgtgcagtactgtcagctattatagacttgatcaaaacacaggaaaaggcaactcccaggaactttccgccacgattccaggatggatattacagctgacagcttttcaggggtggtctgaaaagccagtttgacagccattcttcatcattgtttaaattttggctggatgccaaaccctgggacatgaacaattttcatgtgtaaggtagaagccttcagtaggtagtaaagacttaatgtgcatgacttgatgttatatgtagagatatatatatatatatatatataccataaaagcaatatgttctctgatcatatactctgctgtggtcatgcccactctttgggagtatattccctttatatatattgagtattgtaccacttgagaaattcctttgttctgttatacaaaattaatctttctgctcataatgattgatgataccaccagtaaaaataggatgtttaccccaaaacaagtgtcaattaagaatttgaacacaaccacattttttaaaatgaaacttctatcggaagtaaattaatttgttgtaataaagtccagtatttaataaaatgtacaatgttaaatctc

SEQ ID NO: 171 - DNA, 4160 bp, Homo sapiens
cttaagagctgagcgcagctgacaactaggggccggaccgtcgcaggaggcgtccgctggataccttcccccttccctgacctagagctctacagctgctgcctcggtactgaccgagggttcccagagctgtctcaccattgcaaaaacgttatagcaacagcctctgattacgacatggctgagatcaccaatatccgacctagctttgatgtgtcaccggtggtggccggcctcatcggggcctctgtgctggtggtgtgtgtctcggtgaccgtctttgtctggtcatgctgccaccagcaggcagagaagaagcacaagaacccaccatacaagtttattcacatgctcaaaggcatcagcatatacccagagaccctcagcaacaagaagaaaatcatcaaagtgcggagagacaaagatggtcctgggagggaaggtggacgtaggaacctgttggtggacgcagcagaggctggcctgctaagccgagacaaagatcccagggggcctagctctggatcttgtatagaccaattacccatcaaaatggactatggggaagaactaaggagccctattacaagcctgacccctggggagagcaaaaccacctctccatcatctccagaggaggatgtcatgctaggatccctcaccttctcagtggactataacttcccgaaaaaagccctggtggtgacaatccaggaggcccacgggctgccagtgatggatgaccagacccagggatctgacccctacatcaaaatgaccatccttcctgacaaacggcatcgggtgaagaccagagtgctgcggaagacctggaccctgtgtttgacgagaccttcaccttctatggcatcccctacagccagctgcaggacctggtgctgcacttccttgtcctcagctttgaccgcttctctcgggatgatgtcattggcgaggtcatggtgccactggcaggggtggaccccagcacaggcaaggtacaactgaccagggacatcatcaaaaggaatatccagaagtgcatcagcagaggggagctccaggtgtctctgtcatatcagcctgtggcacagagaatgacagtggtggtcctcaaagccagacacttgccgaagatggatatcaccggtctctcaggtagcagctatttacttcaacctatttcttactgtctgaaccatccccgactccttgcctgtggcccagatagacctccacacttcaagatccttgcctctttcacttttaatctgctcctctttctgtagacattctcttcctgacgagtatctacgtccaatagatttccctggctaggaagattcttcagttgaacaaatggggtctttacatttggcaaggtatcctaaataatattcatgccaggtgctaagagagacttctcaaaaaggctgcaggcatttgtctctgtgccctttaatatacttcttggtatcatgggatttcttcagacctaacctgagaaagttgttctgttctattcctgcttggtttccttggcccctcatccaggcaagcagactcacatatagtcagtgtgtgtttattgtgcaatcactaaagaacacatgggatggccatcaaagatacgaacaacagagccccccctttcccaacatgaaattaccattacataggagaggactgtgtcataggtctgtctccctttttcttatctctttgggggccccagatccttatgtcaaggtgaacgtctactacggcagaaagcgcattgccaagaagaaaacccatgtgaagaagtgcactttgaaccccatcttcaatgaatctttcatctacgacatccccactgacctcctgcctgatatcagcatcgagttcctcgttatcgacttcgatcgcaccaccaagaatgaggtggtggggaggctgatcctgggggcacacagtgtcacagccagtggtgctgaacactggagagaggtctgcgagagcccccgcaagcctgtggccaagtggcacagtctgagcgagtactaatcctgttcttctctcctctaatccccgggggccaagctggggattagaggaggggaaaaagatgacagagaagtggactccaaacctcattttagttgtagaagaaaatttcttacaaaacaaattccacaaagaacaccctatatgaccacagctgcagatcagttcttagcaatgatgtttttttttctgctttgcaaggcgctagaatcttttattttactttattttttttgaggtggagtttcgctcttgttgcccgggctggagtgcaatggtgagatctcaactcactgcaacctctgccctccaggttcaagtgattctcctccctcagcctcccagctattcaggaggctgaggtgggaggatcatttgagcccagaggtagaggctgcagtgagccatgatcatgccactgcactctgggctgggtaacagagtgagatcctgtctcaaaaattaattaattaattaattaaaataaactaggtaaacttggataggcagtagatatttttgcccacctgaggaggaactcagtcaagctgttgcttaacagcttgatccagggcgtgaaaggttagttgagactgaagtgttcacttccatagaagaacatcacttttaaccttgctttggcgaagggagtcggaaagctgagtctctatggacgggggggtgatcttgctttcagtgttccctcagcttttgtggatttaaaaccattctgctccccctaaaccttttgtttgatttcagcccatgttcttgacaatgcagagcaattctgagcagtcacaaagcctactctctgttcttgtccctgccaaccccaccccccataatctgactcacaacttcaccatcagttggggtcataccactagtctctgtcctataccccatgaaatgtaaatactgtatcataagtagaagaaaataatttttgttttctaaaaatgcattttgagatagtttaatgtaaatctgacaggagcattctgaagccccattaggaaaaaatttaaatggttcctcttcatcgccttaatgtctaaagatcagaaatcgctgagcaaacccgcttttgtttccttcccagaaacaatgcaaaacaacaggtggagatagtctggtctttgccctgctgtgtgtgcctctgtagctcctcctgacaaacgtctgggaaaacagcctcaccccactctcctctctcttccccatttccttgtagctttattccttgcatctttgggtctactgagcagtgggtgctgaggtgacaggggaggaaccagttgttctgtagcctaggaactgcctcagtgtctttgccagaaaaaggcaaagaggcggacagtgcagggctccttccctcctacctcaggcctgatccatcgtgcccttgactttgccgtctcaaagtttcttagctgactttggctttcacatttgttctttccagagctaactgataagagtggaggaggaatgccttctcctaagagtcagttgaaagaaagacaagagagtcacatcttagcttttgcacaaggcattcgtggtcaggaataggttagggaatggtcacttctgattttccaacagttgctccttctctgaagagatcttgattcctttgggaagacaagaatttttcttaataacaaaggtccctttatgagttattccttctttcagttcatctcactggagcacagccaagatggacatgtttatggacagtgctctagatgtgaaaacagatagaactggtttgtgggacaggggcagcttgctcaggagagggaataacgcaggtcccttttcttggaaggcttgtactatggccatgacagtgacattgccctcaccatgatccctctccaaagtggttgtctttctttaccttgtgtcttctcttgtaaaaatgaaactcaaaaataaaataaatgtgtcaaattttgaaaaaaaaagaaaactgaaaaagctaacatgaattgtgtgaaattgcataatgctgtaatgctaatctacaatatgtaatgctatcttgtatgttgaatttgttaatgcaccacacaagtgcaaaataaagactgattcacatt

SEQ ID NO: 172 - DNA, 1185 bp, Homo sapiens
gcggaccctgagaggcctgggcgcttccggctggagctgctgggcgcgggacctggggcggttaatttggagtggcccctggagtcagtttcctacaccatccgaggccccacccagcacgagctacagcctccaccaggagggcctggaaccctcagcctgcacttcctcaaccctcaggaagctcagcggtgggcagtcctagtccgaggtgccaccgtggaaggacagaatggcagcaagagcaactcaccaccagccttgggcccagaagcatgccctgtctccctgcccagtcccccggaagcctccacactcaagggccctccacctgaggcagatcttcctaggagccctggaaacttgacggagagagaagagctggcagggagcctggcccgggctattgcaggtggagacgagaagggggcagcccaagtggcagccgtcctggcccagcatcgtgtggccctgagtgttcagcttcaggaggcctgcttcccacctggccccatcaggctgcaggtcacacttgaagacgctgcctctgccgcatccgccgcgtcctctgcacacgttgccctgcaggtccacccccactgcactgttgcagctctccaggagcaggtgttctcagagctcggtttcccgccagccgtgcaacgctgggtcatcggacggtgcctgtgtgtgcctgagcgcagccttgcctcttacggggttcggcaggatggggaccctgctttcctctacttgctgtcagctcctcgagaagccccagccacaggacctagccctcagcacccccagaagatggacggggaacttggacgcttgtttcccccatcattggggctacccccaggcccccagccagctgcctccagcctgcccagtccactccagcccagctggtcctgtccttcctgcaccttcatcaatgccccagaccgccctggctgtgagatgtgtagcacccagaggccctgcacttgggacccccttgctgcagcttccacctagcagccaccagaggttacaaggggagagtggcccttccctcacaagtccgacatctccaggcccccactgaactccggggacctctactgactgcttgctgggacagtcaccagggttggggggaagggccacaaaatgaaaccattaaagacccttaagagc

SEQ ID NO: 173 - DNA, 1293 bp, Homo sapiens
gtccatccgcagcttcggcttttccagtctggtggccctttcggccacccctttaaccccagctttccctcccccttctttcgatcagagatcggcggagaccctcgaagtgcgcaaacttgacactcaccctgaccggactggggttttaaggggtgtggcaggaggttttggactcgatgagtttccaccgaaatgtcggagaagtcaggccagagcacaaaagcaaaggatgggaaaaagtatgcaacactcagtttatttaatacttacaaggggaaatcattagaaacacagaaaaccacagttgcagctcgacatggattacagagtcttggaaaagtcggtatttcacggcgtatgcctccacctgctaacctcccaagtcttaaagcagaaaacaaaggcaatgatcctaatgtaaacattgtacctaaagatggcacagggtgggcatcaaaacaagagcgacatgaagaagaaaaaacaccagaagtgccaccagcacagccaaaacctggggttgccgctcccccagaagtagcacctgctcccaaatcatgggccagtaacaagcaaggtgggcaaggagatggaatccaagtgaatagtcagtttcagcaagaatttcccagcctgcaggcagctggggatcaggaaaaaaaagaaaaggaaacaaatgatgacaactatggacctggaccccagtttacgtccaccaaaatgttgcttgttggagagatggtggtaaggctgcctggctcaccttcgtcatctgatcaagatgaaaagctccctggccaggatgaaagcacagctggaacatcagagcaaaatgatatcctcaaagtggtggaaaagaggatagcttgtggtcctccacaggctaaactgaatggacagcaggctgctctcgcttcccagtatagagctatgatgcctccttatatgttccaacagtatccgaggatgacatatcctcctctacatggtcccatgagattcccaccttctttatctgaaacaaacaaaggccttcgaggaagaggcccacctccttcatgggcctctgagcctgaacgcccatccattcttagtgcatcagaactgaaggagcttgataaatttgataacctagatgctgaagctgatgaaggttgggcaggtgctcagatggaagtagattatacagagcaactgaatttcagtgatgatgatgaacaaggaagtaacagtcctaaagagaataacagtgaggatcaaggttcaaaagcctctgaaaacaacgaaaac

SEQ ID NO: 174 - DNA, 956 bp, Homo sapiens
gctgtgggaacctctccacgcgcacgaactcagccaacgatttctgatagatttttgggagtttgaccagagatgcaaggggtgaaggagcgcttcctaccgttagggaactctggggacagagcgccccggccgcctgatggccgaggcagggtgcgacccaggacccaggacggcgtcgggaaccataccatggcccggatccccaagaccctaaagttcgtcgtcgtcatcgtcgcggtcctgctgccagtcctagcttactctgccaccactgcccggcaggaggaagttccccagcagacagtggccccacagcaacagaggcacagcttcaagggggaggagtgtccagcaggatctcatagatcagaacatactggagcctgtaacccgtgcacagagggtgtggattacaccaacgcttccaacaatgaaccttcttgcttcccatgtacagtttgtaaatcagatcaaaaacataaaagttcctgcaccatgaccagagacacagtgtgtcagtgtaaagaaggcaccttccggaatgaaaactccccagagatgtgccggaagtgtagcaggtgccctagtggggaagtccaagtcagtaattgtacgtcctgggatgatatccagtgtgttgaagaatttggtgccaatgccactgtggaaaccccagctgctgaagagacaatgaacaccagcccggggactcctgccccagctgctgaagagacaatgaacaccagcccggggactcctgccccagctgctgaagagacaatgaccaccagcccggggactcctgccccagctgctgaagagacaatgaccaccagcccggggactcctgccccagctgctgaagagacaatgatcaccagcccggggactcctgcctcttctcattacctctcatgcaccatcgtagggatcatagttctaattgtgcttct

SEQ ID NO: 175 - DNA, 348 bp, Homo sapiens
cagaagggtatcagtcgactggataaacagatgagaaagttcacagatataaggaaaaaaagcagatctgcacacgcagtgaaaatcagcattgtagggcaacaaaatgccattgtgaccttgcctggaatgtgtccccatctctactctaagaaatgcgcaatggactctttggagaaagaagatattttaaaacatttttagtgtgtctgtaaatggttcagcgtgtatcagatgttgtcataggactcacatttctctcagttatatttaaaaccgttgtgtactttgtacaaaggaatactagtcatacttctataaactttacacaataaaatttcattctgg

SEQ ID NO: 176 - DNA, 1019 bp, Homo sapiens
atcaggatccaaacaagaaccacacattatgttcttgtagcctgaagaaaagaagttttcttaaggatagttgttattttgctgcttgatttgtcagtatcttttttttttctttctttcaaattctttttttttttttgagatggaatttcccctgtcatccgggctaaagtgcagtgagccgagatcacaccactgcactccagcttgggcgacagagtgagactctgtctcaaaaaggaaatatcagagttgagaatagaaggatgtagcatggaaagtggaacagatgatgtttttgttgtcacaaataaggggagctaaaccttggcctgagcccttgtgagagggagtacagagctgaattgtgtggataacttacattttaggcagagggttgagaaatacccatttagctacatagagtaagttaaaagttcagaggtttttccgtctctggcgtccaaggtgtaatgaattccttggactgtactgagacctgcagaagaacagacaggagccagttgttcagaatcatgaaaaatcaagaaggctgtgattgaatggagtgtaaacccacatttcccttggaatgcaggtccaagataaatgtgctgcaacaaagcaaaatgtgtggcaattttcatactgaagttgaaccctgttggggagggagagtgggaagtttttagtaagtttgttaaaaaattgtatagggctgggcttggtggctcacgcctgtaatcccagccctttgggaggctgaggtgggtggattgcttgagctgaggagtcggagatcagcctgggcaacatgacaagaccctgctgtctctacttaaaaaatacaaaaaataaaaaaataaaaataacctggtgtggtggtacgcgcctgtggtcctagctattcgggaggctgaggtaggaggatcacttgagcccctgcaggggtggggttgcactgagccaagatcacgccactgcattccagcctgagtgacagagcgagaatctgtctc

SEQ ID NO: 177 - DNA, 1651 bp, Homo sapiens
cgataatcttcttccatttttgcggaaatttattgcatccttctttaaaccggggtttgagaagtataataacttggatctgtttcggtatctcttaaatattccaggaccaattgacattccatctcgtttatgtaaagggaattttgatgatgatatgtttaaccaccaagttccttatttgtggctgatttactgcctttgtcatcctcttcaatcaagtattaaagaaacagtggaggcatatgaggcagcattaggggtggctatgagatgtgatatagtacagaagatatggatggattatcttgtctttgcaaataatagagctgctggatccagaaacaaagttcaagaattcaaattttttactgatttagtgaatagatgtttggttacagtccctgcccgataccccattccttttagcagtgctgattactggtccaactatgaatttcataatagggttattttcttttatttgagctgtgttccaaagacccagcattccaaaaccttggaacggttttgttcagttatgccagctaattctggacttgcattgaggttacttcaacatgaatgggaagaaagcaatgttcagattctgaaacttcaagccaagatgtttacatataatatcccaacatgcctggccacctggaaaatagccattgctgctgagattgttctaaagggacaaagagaggtccaccgtttatatcagagagccttacagaagttacctctttgtgcatcactgtggaaagatcaactcttgtttgaagcatcagaaggaggtaaaactgataacctgagaaaactagtttccaagtgccaagagattggagtcagcctaaatgagctcttaaatttaaacagtaacaaaacagaaagcaagaatcactgaacactgggtgcagtcagttctaagtccttataataattgccaaaattatttgaatgattcttcaagattaggctgatccctggctaaggtctgtgtaaggcagacaagcgttattgatcatatcaagttccctacaatatcctgtcctcaaaaccggaagcaatgaacatgatcctcttcggttggataaatgaacttcctgtttggcctgcttctaggccctgccagattctcataacatcatatacgtaagtatagttcctcaaagtgactgacatttattttaattttgctttgtttttttttattttctcccccattcctttattttgtgttattcctgactcacttgacactctctgatgcctgagagattcctgtttgggatttaatatccagggctgtgtttacagtaaaaaaagcaggcagtcccttttagtttttcctttttaaatttttttgagattcttcatttcaggattttaaaactatagcagtccatcttaaggaaagtgtaactgccatggccacaagtctgctagttgcacttgaatgctctatcagggttgtttattaccctttctacgttctggactccttgccgagactgtttaacttgaagattaaagaaactattgcaaatgccagtgcatcagaacctaagagtggtcaaatattatgtgcaatttttttgtaaagaaattttaatttataataaagtttaacagtttaaagaac

SEQ ID NO: 178 - DNA, 2701 bp, Homo sapiens
gaattcggccaaagagtttttttttttttttttttcgcatttgagatgctttttataataaagttatgccaaaaatacagcaacaaatacagaaaaagtattaacaaacggagaagccccagatacacgtacagtaacaatacaaaaatgtgactggtcaaacagctcaagttcacatttaacactttcaattatttttaattacactatttctgttcaaaagaatgttttccttacatacaaccatgatcagtctttagtctcaatcgtaccaaaataaagctatatataagcactctgactaggtaaggtgtgaagtaccccgtgagttgctctgtggcttgagatgggacacatggtctcaaatgactcttatgcatgccttgccttaagaaagaaaagtaatgttgatggtttaaaaagtaagtactttttgaagcagcagatgaaatgtgtttactaccagcctaaatcaaagaacatggcaagagcaagactgttctcaggaaggaaaccataaatatggcatttatgtaaaatccttgcagcatctgaccatgcttttatctttaaaaaaaaaaaatcctcactttcttaaatataagtaacagtttattaatttttttttttacagtgagatatggctatgggaagcaggtgatactatttgtttaagaaactgggatgccaactaacacgtggagttccccaagactttgcaatctccatttgtgagtttctgtaaaaaagggaacccagctagaggattcacagagaccttgaatgacaagcgacatactcgaaatctgcagctctcctcccggagggcccagcgtgccaggagacacgctgcagtaaggcacttaccaagctcctttggatagagggaaagaagaaatcaatccaggcaacatgcaagtttcagtgaagtcagacattttatgggaatttaaagtcttgcctgttctcagtgcaccccagtcagttactgacatgtcagcctcagaaaccgcacatggcctcaggaaggtcaggccctcctgctggtgggcacgccattggctcttgatcgctgatggtctcgatgatggtcatatttcacagaaataatgaggaaaagcaggagggtagctccttgaatagcagccagaagaaaaaagtaatagttcaaatagcagccgttaatattaccaaagtctgtgtgactgctcatccatccgatggctttgatagacaccagtgccagcagtccagaacccacgaacgacccgacgccagagaagaaaaagaacaagcccattatggcactctgcatggacttgggggcagctgagtatgcaaattccaggcctgcgatacttgcaaagatctcgctgatcccaatcagcaagtactgcggcacctgccaccacagcgacagatcggcagcatggtagacgacgttgccgatggtctgattaatggttttctctttaacaaggttcagccttttactctccaaaattcctgcagcaaaggctgagcacatgacaaagaacatgcccacggcgatcctcttcagggaggatgggagcaggccatgtcttctcaaaatgggatcgaccagtttgtccttcagagggatgagcaggaggatgagcacagcatcaaacatggtcagccaggctgcagggagcgtgtgaggagtggttgtaatatttgaaatttctggaatcctcaaatgaagactctgtaaaacatatgttgtctgcatttggaaatacactgtccagtaaggtatcaaagccaagaaaacagggacaatcttgaccagagctttcacatcttccactttctcttctgtaaatggcccaccatgagacatcttacatgaatcaaacagactttgtttagaagattgctgaaagactccaatgccttcaccattactctggcgctctccacttcgcttctgggaacagcaggaatacgtcagtatcttgaacatgtcggtgaaggcactgccatcaggaggcttggtgatgaaaacgctctggccacagaggaagaccacaaaagcaaggccgacgcagacagtggggatcgcataaccagtgacaaagctgacgttctgctgaatataggcaatgccacctaacgacaggatcgctcccaggttaatgctccaataaaaccaattaaaaaatctcctagtggcttccggacctcgatctttaacctggtcggcgccgaagggcgtgatgttggccttgacggtggccacgcccaggcccaccagcaccagccccgcgaaggtggccggtgagcagcagcgggcggcggcgtcgggaccaggcgccgtgcagttgagcaggcgcgcggaaccgcagagcgcggctcgcgtggcgggcgcggccagcagcgggaaggccagcatgcccagcaggtagagcgccaggctcagcaggatggcgcgcgcccggcccagccgcgcgtcggccagccagcctccgaacggcgagcccaggtaggtgaggcccatgaagagcagcagcgcctcgctggcctgcgcgccctcccagcagaacggcgccccgttcaggaatagcaccaggttggacgtgatgccgtagaaagcggcgcgctccagcagctccgtcagcagcacggccccgcacgccgcgcgccggcccgcgaacgccccagccgccgccgcggccgc

SEQ ID NO: 179 - DNA, 1916 bp, Mus musculus
gggtgcgcttctcggcggggccgggcagggccgtcgcctggcggtgaggacgcgctcccggggcgggcgctatggccaccaactagggcggccggagaagcggccgaagcccaagatgccggagcgacggcacggctgcgcctccgccatcgtaggtgccgatccccttgccacagtcgagtctccatggcctgaccgtgtcttgacaataattttgagcaaaatctatgtctaataagaagataaccacatcaagatggttgggaagctgaagcagaacttactcttggcgtgtctggtgattagttctgtgaccgtgttttacctgggccagcatgccatggagtgccatcaccgaatagaggaacgtagccagccagcccgactggagaaccccaaggcgactgtgcgagctggcctcgacatcaaagccaacaaaacattcacctatcacaaagatatgcctttaatattcatcgggggtgtgcctcggagcggcaccacactcatgagggctatgctggacgcacatcctgacatccgctgtggagaggaaaccagggtcatccctcgaatcctggccctgaagcagatgtggtcccggtccagtaaagagaagatccgcttggatgaggcgggtgtcacagatgaagtgctagattctgccatgcaagccttccttctggaggtcattgttaaacatggggagccggcaccttatttatgtaacaaagatccgtttgccctgaaatccttgacttaccttgctaggttatttcccaatgccaaatttctcctgatggtccgagatggccgggcgtcagtacattcaatgatttctcggaaagttactatagctggctttgacctgaacagctaccgggactgtctgaccaagtggaaccgggccatagaaaccatgtacaaccagtgtatggaagttggttataagaaatgcatgttggttcactatgaacagctcgtcttacaccctgaacggtggatgagaacgctcttaaagttcctccatattccatggaaccattccgttttgcaccatgaagaaatgatcgggaaagctgggggagtttctctgtcaaaggtggaaagatcaacagaccaagtcatcaaacccgtcaacgtgggggcgctatcgaagtgggttgggaagatacccccggacgtcttacaagacatggccgtgattgcacccatgctcgccaagcttggatatgacccatacgccaatcctcctaactacggaaaacctgaccccaagatccttgaaaacaccaggagggtctataaaggagaatttcagctccctgactttctgaaagaaaaaccccagacggagcaagtggagtaactgagcccgtaacttcccacagggacgactgctgccttgtttacagaagggaaatctcgggaacggctgtctgctgcgacaaggagtgtctgtgcccatcgctcctgttcacctgccagcctcctgtccccagggggggtgtcacacacccgggcctccccaagtgatggctcttgagcccaggaacatgcatggccctcaggatgaggagcccagcagggacacagttctgtcacagctcctcttgtccttgtctttccttcccaggttccagtctttaatttcaaggaaaggagagtttgaagttggcattctgttaacaaaatcaggcagtctcattccgaataggttctatgtacacgttccgatgttttgtagaacactcgtgcctgttgaaacgtatcgatgtggataatagtaaataccttaattatttaaataattcattgtattgtttcagagacgtttggaaattactgtatacatttacaacctaatgacttttgtattttatttttcaaaataaaagcttaaatgtgaagcactc

SEQ ID NO: 180 - DNA, 3720 bp, Homo sapiens
  misc_feature 2171,2848: n = a,c,g, or t
caaatattgaccaagacataaataacttgaaagaaaaatgggaatcggtggaaaccaaactcaatgaaaggaaaactaaactggaagaggctctcaacttggcaatggagttccacaattctctccaagacttcatcaactggcttactcaggctgaacagaccctaaatgtagcttctcggccaagtctcatcttggacacagtcttatttcaaattgacgaacacaaggtttttgccaatgaagtaaattctcatcgtgagcagataatagagctggacaaaactggaacccacctaaaatattttagtcagaaacaagatgttgttctaatcaagaatctacttatcagtgtacaaagtcgatgggaaaaagtggttcaacggttggtagagagaggaagatctttggatgatgcaaggaagagagccaagcagttccatgaagcttggagtaaacttatggagtggctagaagagtcagaaaagtctttggattctgaactggaaatcgcaaatgatccagacaaaataaaaacacaacttgcacaacataaggagtttcagaaatcactcggagccaagcattctgtctacgacaccaccaacaggactggacgttctctgaaggagaaaacctccctggctgatgacaacctgaaactggatgacatgctgagtgaactcagagacaaatgggataccatatgtggaaaatctgtggaaagacaaaacaaattggaggaagccctgttattttctggacaattcacagatgccctacaggctctcattgattggttatatagagttgaaccccagctggcagaagaccagcctgttcatggagacattgatttggtgatgaatctgatcgataatcacaaggccttccaaaaagagttggggaagaggaccagcagtgtgcaggccctgaagcgctcagcccgagaactcatagaaggcagtcgggatgactcctcctgggtcaaggtccagatgcaggaattaagcacacgctgggagaccgtgtgtgcactttctatatcaaagcaaacacggttagaagcagccctgcgtcaggcagaggaattccactcggtggtacatgccctcttggagtggctggctgaggcggagcaaaccctgcgtttccatggtgtcctcccagatgatgaggatgctctccggactctcattgatcagcataaagaattcatgaagaaactggaagaaaagagagctgaactaaataaagccaccactatgggcgacaccgttttggctatctgccaccccgactccatcactaccattaagcactggataacaatcatccgggcgaggtttgaggaggtgctggcctgggcaaagcaacatcagcagagattagcaagtgctctggctgggcttattgccaaacaggaattgttggaagctttgctggcttggttgcaatgggctgaaactacacttactgataaggataaagaagtcatcccccaggagatcgaagaggtgaaagcactcattgcagaacaccagaccttcatggaggaaatgaccagaaaacagcctgatgttgataaagtaacgaagacctataagaggagagctgctgatccttcctcattacaatcccatattccagtcttggataagggacgagcaggaagaaaacgctttccagcatcaagcttgtatccctctgggtcacagacacaaattgaaaccaaaaatcctagggtaaacttactggtgagcaaatggcagcaagtctggctcctggcgttggaaagaaggaggaaactcaatgatgccttggacagactagaggagctgagggaatttgctaactttgattttgatatctggcgcaaaaaatacatgcgatggatgaatcacaagaaatctcgagtgatggacttcttcaggagaattgataaagaccaggatgggaaaataacgcggcaggaatttattgatggaattctttcctcaaagtttccaaccagtcgcttggagatgagcgcagttgcagacatctttgacagagatggcgatggatatattgactactatgaatttgtagcagcccttcacccaaataaagatgcatataaacctatcacagatgccgacaaaatcgaagatgaggtgacaaggcaggtngctaagtgtaaatgtgcaaagcgatttcaagttgagcagattggtgataataaatacaggttcttcctgggaaatcagtttggagactcccagcaactgcgactggtccggatcctgcggagtactgtgatggttcgtgttggaggtggatggatggcacttgatgagttcttagtgaaaaatgatccttgcagggccaaaggaaggacaaacatggaactgcgtgagaagttcattttagcagatggtgccagccagggtatggctgctttccgaccccgaggccgaagatcccggccatcatcacgaggcgcttcacccaacagatccacttctgtgtccagtcaggctgcgcaggcggcctccccacaggtccctgccaccaccacacccaagggaacgccaatacaaggaagcaagcttcgacttccaggatatttatcagggaaaggcttccactctggggaggacagtggcttgataacaactgcagctgccagagtccgaacacagtttgctgattccaagaagactcccagccgaccaggaagtcgagctggaagcaaagctggcagcagggccagcagccgccgaggcagtgatgcatcagactttgacatttcagaaatccagtccgtgtgctcagatgtggaaactgtcccccagacacacagacntacaccccgagcaggttctcggccatccacagcgaagccttcaaaaatccccacgccccagaggaaatcacctgccagcaaattggacaagtcctcaaagagatagtgcaattggttctaccaaggcccttccttgagcatttattatttaagtttgaacgatgtaaaatatggtgtagaaattcttgtgaaatattgcaagaggcgagtttaaaattctgcagatggccttatttgtgtatttgtctttttattttatctgtataattttttttgtcagatattctggggttaaagtcacatcatatgtgaggaggaaaagtttaacatgaactaacatttctgcactgtaacgtgccgggcacacactaaactcagttactgtacctacaggtaagtctacatcctctctgacagccacagcactacatcaatccctgacgttagggatacctcatgacattttcctgtttttatggaaactctgagaagctgaatgatacatgcaggggatattttttgagatgatttaaatgtaaaccaaaagatggaagacaaaaagacaaacacacccacacgcagtctttgcagtatctgacagagaactcacaggaagttacttcaagcacttgccagtactatgatattcaagtaccttgcagcatttctctgccattgctttcaatgaggccagaggcatcctggatattagacctattatactgtaagaatataagtataaagtgcgttcatatacatgtgaggttttcttttgcttgagtggacagtagcacctgtatcattgaactcattttgtatcagagcaattttgcttgcagaaagctatgaaataaaacacgtcccttaactgc

SEQ ID NO: 181 - DNA, 680 bp, Mus musculus
gcctcccaagtgctgggattaaaggcgtgtgccaccatgccccacttcatatgttatatttttaatgaataaagagtggaaaaattatgtatcacatgtgttaatttggggagaagcgctttataacagagggcttactctcaattaaagagaacaaaggaaaatgtgttctacaggcagtgtatacctttgacctctgaaaaaacctatatagtttctcctacagacaccttgccagtaaccttacaggtcttataggagagcagatccaagttgccaggctgatctgcaagcacaaacatttgtcaagggaaagcacaggtcgttactttcagtacaaaatggttctttgctatggatggattctcttcttcttgccccatgtcctgttcccaaggaccgacttcctgcagcactgtggtggactcttctatgaggagacaacatctgggccttattcaatagcctgtggtgggtaatgtgttttgtcaagagctaaacagcaaatggatttaatttctgcttaacatggtcatagtcattctgaaatggctacagaaatattctctgtactagaaaaaggaatggaacgtggtgccaattgtctattttcctttatttattccctgtaagtctgtcagatgataaattgaacataacagtgattaaagagtcatgct

SEQ ID NO: 182 - DNA, 1849 bp, Mus musculus
catccttggaacgggcaaccctagatttcaagcctcttcataaacccaatggctttataaccttaccacagttgggcaactgtgaaaagatgtcactgtcttccaaagtgtccctcccccctatacctgcagtaagcaatatcaaatccctgtctttccccaaacttgactctgatgacagcaatcagaagacagccaagctggcgagcactttccatagcacatcctgcctccgcaatggcacgttccagaattccctaaagccttccacccaaagcagtgccagtgagctcaatgggcatcacactcttgggctttcagctttgaacttggacagtggcacagagatgccagccctgacatcctcccagatgccttccctctctgttttgtctgtgtgcacagaggaatcatcacctccaaatactggtcccacggtcacccctcctaatttctcagtgtcacaagtgcccaacatgcccagctgtccccaggcctattctgaactgcagatgctgtcccccagcgagcggcagtgtgtggagacggtggtcaacatgggctactcgtacgagtgtgtcctcagagccatgaagaagaaaggagagaatattgagcagattctcgactatctctttgcacatggacagctttgtgagaagggcttcgaccctcttttagtggaagaggctctggaaatgcaccagtgttcagaagaaaagatgatggagtttcttcagttaatgagcaaatttaaggagatgggctttgagctgaaagacattaaggaagttttgctattacacaacaatgaccaggacaatgctttggaagacctcatggctcgggcaggagccagctgagaccaggccctgcctaggccctgccgcagaaccaccatccttgggaggccctgcagagcccacctgtggggaaagagaaggggcagcttccggattttcttttgggggttagaaggtcaggtgtggagactgctcgccagtctctgtgagcctaggccctgagctggggaggtggggaagattcgggcatgtgagtgcccccagaactgtcctggctccttccgtattaaacgcatttgcattttgagaagtgtccttcccacttcagccctccggagagactaccctagtctttctggggtgtttatgtcctcagctgaagcctggcctagttgctgagaggggctggggagatggggcgggagggccagactcagtgctgctgtggagctaggtgcttcccccttcccctcagactggtggactgaactccagtcaagttgagttcaagtgaaagattcttccagggttttattttttcccctcctaacaaagtctcatagtgttaacactggttctgcaatatctctgaggtgcaaagaatgcacttttccctatggggcccagagtttgccttttctgccaggcagtcaccacgcttccctaccccagcctgtttcttttggcttggtttggaccacagtcctctgctacccagggttttagagcccctgctctaggaaacagtttaagaaatcattggccccttcccagcacattgaatgggtaagcagacaggccatgatttagttggccagcactaactccacctctgttctccttgaacagcttcccctccagcccactgctttaggatgacacaatgaataacacctagtcatagaaatcagtctctctggtttgttttgtattatgttgtacatcattaaagatctaaatacaaaggatatacagtcttgaatctaaaataatttgctaactattttgattcttcagagagaactactaataaaaatctaaaaggt

SEQ ID NO: 183 - DNA, 466 bp, Homo sapiens
cttggagactcctgggacgtgaaactgggagccttaggtgggaatacccaggaagtcaccctgcagccaggcgaatacatcacaaaagtctttgtcgccttccaagctttcctccggggtatggtcatgtacaccagcaaggaccgctatttctattttgggaagcttgatggccagatctcctctgcctaccccagccaagaggggcaggtgctggtgggcatctatggccagtatcaactccttggcatcaagagcattggctttgaatggaattatccactagaggagccgaccactgagccaccagttaatctcacatactcagcaaactcacccgtgggtcgctagggtggggtatggggccatccgagctgaggccatctgggtggtggtggctgatggtactggagtaactgagtcgggacgctgaatctgaatccaccaataaataaaggttctgcag

SEQ ID NO: 184 - DNA, 744 bp, Homo sapiens
tatatttaaaggggatagcatgtaatttagcatttaactcattctttttttaaaaaggaaaactataaaggtggccgtacttactaatattttcagatgcactatttattttgtttagtttttcttactgtcttttgtctattgccatgttccatttccccacacgctaaattcacaaaagctactatcattggcactaaaacatctcaagcattgggcttgtgagatacatagttacctgaaaaaatttagaagaaagccaggaacactgtgctagaaggaactggaagttctgaagggcttgagtgccatattttattatacatctgttgatctaaactgcgactaggttctttttacctttgttttctacagttttaaccactactaaatctgggctttctgtctccaatctgcctctcttactgccatagcgtgtactcgtatggctctttatttaaatctataggccaggtacggtagcttatacctttaatcttagcactttgggaggttgaggagggaaaattgctggagactagcagttgaagaccaacctggacaatctagcaagacctgtgtgtgcaaataaataaataaatgaattcgcagggtgtggcggcatgtaccttgtagtcccagctactcaggaggatcaccacagcccaggagggcaaggctgcagtgagccgtgattgcaccactgcattccagcttgggcaacagagcaagatcctgtctctt

SEQ ID NO: 185 - DNA, 1203 bp, Homo sapiens
  misc_feature 828,930: n = a,c,g, or t
cgtaaatatgacgaggagctcgggaaagctgcccggttttcctgtgacatcgaacagctgaaggcccaaatcatgctctgcggagaaattacacatccaaagaacaactattcctcaagaactccctgcagctccctgctgcctctgctgaatgcgcacgcagcaacctctgggaaacagagtaacttttcccgaaaatcatccactcacaataagccctctgaaggcaaagcggcaaaccccaaaatggtgagcagtctccccagcaccgccgacccctctcaccagaccatgccggccaacaagcagaatggatcttctaaccaaagacggagatttaatccacagtatcataacaacaggctaaatgggcctgccaagtcgcagggcagtgggaatgaagccgagccactgggaaagggcaacagccgccacgaacacagaagacagccgcacaacggcttccggcccaaaaacaaaggcggtgccaaaaatcaagaggcttccttggggatgaagacccccgaggccccggcccattctgaaaagccccggcgaaggcagcacgctgcagacacctcggaggccaggcccttccggggtagtgtcggtagggtttcacagtgcaatctctgccccacgagaatagaagtttccacagatgcagcagttctctcagtcccggctgtgacgttggtggcctgagctaggaggaaaaagagcagttttcactcagttttggttccctgcccgaggtgctgacccaattcgctgccaaaagagtgtcaatcagaatatacaaatcccgtatggttgtgtcatcctctnttaatcatttttactaattctaataatcagctctagcttgcttcataattttcatggctttgcttgatctgttgatgctttctctcatcaagactttgcagnattttagccaggcagtatttactcattattaggaaaatcaagatgtggctgaagatcagaggctcagttagcaacctgtgttgtagcagtgatgtcagtccattgattgtctttagagagttaatgttacaaaaaagaattcttaataatcagacaaacatgatctgctgaggacacatgcgcttttgtagaatttaacatctggtgtttttctgaaaaaatatatatacatatattgctttatttgaaacaaattaaaatatgctgcatttg

SEQ ID NO: 186 - DNA, 883 bp, Homo sapiens
catctgaccatccatatccaatgttctcatttaaacattacccagcatcattgtttataatcagaaactctggtccttctgtctggtggcacttagagtcttttgtgccataatgcagcagtatggagggaggattttatggagaaatggggatagtcttcatgaccacaaataaataaaggaaaactaagctgcattgtgggttttgaaaaggttattatacttcttaacaattctttttttcagggacttttctagctgtatgactgttacttgaccttctttgaaaagcattcccaaaatgctctattttagatagattaacattaaccaacataattttttttagatcgagtcagcataaatttctaagtcagcctctagtcgtggttcatctctttcacctgcattttatttggtgtttgtctgaagaaaggaaagaggaaagcaaatacgaattgtactatttgtaccaaatctttgggattcattggcaaataatttcagtgtggtgtattattaaatagaaaaaaaaaattttgtttcctaggttgaaggtctaattgatacgtttgacttatgatgaccatttatgcactttcaaatgaatttgctttcaaaataaatgaagagcagctgtccttctttcctcttttaagtgttcagctgtggcatgctcagaggttcctgctggattccagctggagcggtgtgatacccttctttttcagctgttcgtgccttcctttcttgtatccaccaaagtggagacaaatacatgatctcaaagatacacagtacctacttaattccagctgatgggagaccaaagaatttgcaagtggatggtttggtatcactgtaaataaaaagagggcctggg

SEQ ID NO: 187 - DNA, 1009 bp, Homo sapiens
ctggctctgagaaacttttcagctcgaagtccaatgctcaattcaaaatgtataaaacggtgagtatcacgcgtctggcggtagcatcaggggcctaatgaggtgttgcctctatcttaaggccttcctggcagaccctgagctggccttacgggaccctcctcacctggttccagatcgctcgtgcttcctttgctgcttcccacgggaagggccccatgcagctgggcactccccacctgccacaggccatcagccagattccagctgagattctggcttcctcctggccagcgtgacacctgggctcaccactgtgtgcattcagcattgggtctctgtaagccgagccccagcacagcaccagcgttgctagcagagagccttttgcaccagccgtcatgggcgcttggagctcctgtccccacccagtcccaacacctgacccacctcgataatgacttttccagaaatggaggcttcattgttcttacaaatggaggtttcatttgttctgtgtagaagaccttagacactagacccctttctccttctcaacaaggctcttcagaacaaacagaactctctctggacataggcgggtggaatgttctagcccatctcacagcctgtgttttggccctaattctttcagcccattttcctgaatgaagtcttggtgaaactgcccacagacccttccagcgatgagcctgtcttccacatttcccacattgatcgggtctacaccctccgaacagacaacattaatgagaggtcagtcctgaccatgtgtggcctgccttgaactctgggagaaggcctggacgtctccctctgccataaacccatctccagccgtgcttaagccccactaattctgtatcctgaacctctcttaacacatcccctctgctccagtcccatggtaggccttggtcactgcagctgcctgccttcctcccagagggtgtttcctagaaactgataaattagatcgtgcctcttt

SEQ ID NO: 188 - DNA, 1874 bp, Homo sapiens
ggcacccggataaaaatctggataatgccgcagaagcagctgaacaatttaaattaatccaagcagcatatgatgtgttgagtgaccctcaggaaagagcatggtatgataatcatagagaggccctacttaaaggtgggtttgatggcgaatatcaagatgacagcttagatttgctacgctatttcaccgttacctgttattctggttatggagatgatgaaaaggtagtccatcctttctacgcttattggcagagtttctgcactcaaaagaattttgcatggaaggaagaatatgatacacgacaggcttcaaaccgctgggaaaaacgagccatggaaaaagaaaacaaaaagattcgggacaaagcaaggaaagagaagaatgagcttgtccgtcagctggtagctttcattcgtaaaagagataaaagagtgcaggcgcatcgaaaacttgtggaagaacagaatgcagagaaggcgaggaaagccgaagagatgaggcggcagcagaagctaaagcaggccaaactggtggagcagtacagagaacagagctggatgactatggccaatttggagaaagagctccaggagatggaggcacggtacgagaaggagtttggagatggatcggatgaaaatgaaatggaagaacatgaactcaaagatgaggaggatggtaaagacagtgatgaggccgaggacgctgagctctatgatgacctttactgcccagcatgtgacaaatcgttcaagacagaaaaggccatgaagaatcacgagaagtcaaagaagcatcgggaaatggtggccttgctaaaacaacagctggaggaggaagaagaaaatttttcaagacctcaaattgatgaaaatccattagatgacaattctgaggaagaaatggaagatgcaccaaaacaaaagctttctaaaaaacagaagaaaaagaaacagaaaccagcacagaattatgatgacaatttcaatgtaaatggacctggagaaggagtaaaggttgatccagaagatactaacttaaatcaagacagtgccaaagaattggaagatagtccccaggaaaatgtcagtgtcacagagatcattaaaccatgtgatgatccaaaaagtgaagctaaaagtgttcctaaacccaaaggaaagaaaaccaaagatatgaaaaaaacctgtcagagtacctgctgaaccacaaacaatgagtgttcttatcagctgtacaacctgccatagtgaatttccatctcggaataaactttttgaccatctaaaggccacaggtcatgcaagagcaccttcatcatcgtctttaaacagcgcaacaagtagtcaaagcaagaaagagaaacgtaaaaacagatagagattctgcctgtgcttttgtttgactgtctctagattttgaaaccaaaaaactgaactgaaatcatctaaagagttaaaatttcagtgatctgcaattaattacattgtggaagattattttttatcttgtaaaaacacttttttggtttaatatatatttttaaaacatttcactagtgattgaattctacttttgccatctgaattgacttgaatgtcttaaaacaggtaaatactgtaaagtgtgtattcttgatgtttattggctcatgtggacagaaatgtacagggagaattacattattttaacacacagaagtgcaactttctgctttattttctgaatttcacattacttttacttaatgcttttgtgttttgttaatacttcataatatgtgaaaaactcggatcttttaaaaagcatcatagatcatttttccatatgacactggttccgattttaaaaattatttttaaataacc

SEQ ID NO: 189 - DNA, 1114 bp, Homo sapiens
  misc_feature 458: n = a,c,g, or t
cacgctcactatggggtggtcgattggtctgcattcccccgcccgcctccccgcaaacaccagcgtccaacagaggcagagtcccaggctctgttcttgctaatgagagacctgtgggggcgacttgccaggtgtccccttgaactctttcctggctcctgggtgccctcaacgtcgttggaggcctgcagtctgccccatggcccccgcagggctgagcaggcctgttgccagcccagccccgtgcctggtctgtgaggggcagagcatgagctggcttagagccctgagtgggcaccggcttgggagggtgcggggagttgactccttccctaactgctctgcgcctggcccctgcctctacaggagcaggtggtgaggatggctccgggcccgtgtggggcctccccgacccaaaagcttcaaggacacggggatgccagcctcttccccaagangattttattgaatgcacacaaagttcatccttgggtttgcaaaaagtcccacaagtgaagaggcagcagtgctcatgtgaacatggagcgctcaccccagcccctcagcacagccagggggccttggggtacacaccctccttccctggggccgccagcacctcctctgccctatcccggatggggcctgggggtctgcccagggtgcgaaactggaatctatgctgaaacacctaagtgcccaggaggtgcccccatggcccaggagtgacacggctcccccagcagccagagcccattcctgagccagacaggtcacggttgacccaggaagagccatgtgccaggatggccgccaagcctcactgagcatgtgcagcagtggcagcctctcagacatagagggggctccctgggtgacatctccagagacccccttgtcccccagacacccctgggtagactgtgtctgacccttcacaaataggaaatgagagctcgggtcgaaatgctcacaatttcctgcgtgtctcagatggttgttttcttaaatggtcgggccatactttaacttggtttatggaaatgaatccatttcaagattcatcaaatcaataaggtaaaaaggaaaaagaaagataataaacattcaatct

SEQ ID NO: 190 - DNA, 1756 bp, Homo sapiens
gaaaaaaaaaaaaaaaaaaagtactctatgggtgtcctgagatgccctggagcagagacctggctccagggaccatgctgacttcagcctctaccacagccagacaaggacagccggctgctgcccctgctggtctgcctgcggttcctgttcgtgcccctcttcatgctgtgccacgtgccccaaaggtcccggctgcccatcctcttcccacaggatgcctacttcatcaccttcatgctgctctttgccgtttctaatggctacctggtgtccctcaccatgtgcctggcgcccaggcaggtgctgccacacgagagggaggtggccggcgccctcatgaccttcttcctggccctgggactttcctgtggagcctccctctccttcctcttcaaggcgctgctctgaagtggcccctccaggctctttggcagcctcttctcgacgtctccttccggagctgagatccagcccagggcgaatggcgagcttggctcaggcctctgcggggtggaggcccctgggcctgaggctgccagcagcgggcaggagctgctcttcatccacttggagtgctgcggggaagaaatcaccaccggtcattctaaccctcacccaggaatgggggtgactcgcacaagacctcatggaaagggtgatgactagggaaaagagggtgcagggcacggctgctccccaccaccaggtctgcatttgttcatcatcatcaggagcagaggtgaccagagggttcagagtgggaggcagatacagccagggaaggagcgcctcatcttcccaggcctcagccacccagggtaaaaggtgccagggaagttgtgggcacctgagaggaggaacagatgtggaggacctgagggtgctcaaagggccaggctcagcctcaagcagtgttttcattgccaacacttactgtacccactccgcagagccccgctgggcctgggccccagggccacagctagcctgcatgtgtgtactgcactttacagtttgcaaagctcttccatacccactctctcaccgaagcctaattgaggctcttggaaggagtcaggcaaggattgtgcttcccccattatacaggtgacaaaactgagtcctggggaaagtgactggtccgtggtagagccgggacccaatcccctctctctcctccctgttggtgctgttcttcctgcccaacacctgtttctcttttcctcaaggggtttggggcaggagcctgggcacttactccccgtttttgctgtttctccttctgaccctgctcttgggtctaataaccccatttatttgtaaaaaaaaaagtccctacaaacccatgattgtcagggaggtgccagttacagcaggtgattcagctacttgaggtcggtaacagaccttccattcctcactgaaggtggggtttgtgtttttgttttgccctgttactccactggtagtcatctggtgtttgtactataacaacagcaagaaaatctcatttatctttatatactctttgcacctcctttttttagtcgagatataaatatttgaggggagagaaatatctacaggtatatatggaaacaaataatgtggtctgctttataagatggccagatctacattaggaaaagtataagccccctccctaatggccgctggggggtgagggcggtgtgttgtatgtctttgggtgtttgtttttttataaagcatataataaaataatcgtgctact

SEQ ID NO: 191 - DNA, 2071 bp, Homo sapiens
gctttcgcagcgatcgcgagcgtgtggcgattgcttctgtctgttatttagatatggaagctgaggggatgcacagaggcagccagaacctaggtcagggtctcgctcggtgctgaccgcccccggggtcgagtaggcgatgggggagcccggcttcttcgtcacaggagaccgcgccggtggccggagctggtgcctgcggcgggtggggatgagcgccgggtggctgctgctggaagatgggtgcgaggtgactgtaggacgaggatttggtgtcacataccaactggtatcaaaaatctgccccctgatgatttctcgaaaccactgtgttttgaagcagaatcctgagggccaatggacaattatggacaacaagagtctaaatggtgtttggctgaacagagcgcgtctggaacctttaagggtctattccattcatcagggagactacatccaacttggagtgcctctggaaaataaggagaatgcggagtatgaatatgaagttactgaagaagactgggagacaatatatccttgtctttccccaaagaatgaccaaatgatagaaaaaaataaggaattgagaactaaaaggaaattcagtttggatgaattagcaggtcctggagctgaaggcccctcaaatttgaaatccaaaataaataaagtgtcttgtgaatctggtcagccagtgaaatcacaggggaaaggtgaagtggccagtacaccctctgacaatttggatcctaagttgactgcccttgagccaagtaagaccacaggggctcccatttaccctggcttccccaaagtcacagaggttcatcatgagcagaaagcctcaaactcttcagcatctcagagaagcttacagatgtttaaggtgaccatgtccaggattctgaggctcaaaatacagatgcaggaaaaacatgaagccgttatgaatgtgaaaaagcagacccaaaaggggaactcaaagaaagttgtgcaaatggagcaggaacttcaggacttacagtcccagctgtgtgcagagcaggctcagcagcaggcaagagtggagcaactagagaagactttccaggaagaggaacagcatcttcagggtttggagatagcccaaggagaaaaggacctgaagcaacagctggcccaggctctgcaggagcattgggctctaatggaagagctaaatcgcagcaagaaggactttgaagcaatcattcaagccaagaacaaagaattagagcagaccaaggaagagaaggagaagatgcaagcacagaaggaagaagttcttagccacatgaatgatgtgctagagaatgagctccaatgtattatttgttcagaatacttcattgaggctgtcaccttgaactgtgcccacagtttctgctcctactgtatcaatgaatggatgaagcggaagatagaatgccccatttgtcggaaggacattaagtccaaaacgtactctttggttctggacaattgcattaataaaatggtaaataatctgagctcagaagtgaaagaacgacgaattgttctcattagggaacgaaaagcaaagagattgttctgaagaccgtgctctaagggcatttgaaagactgccaggtagtgcgagcctgagatggtctggaggattctctctagccgtgactccgctgctctgaaggtcaactgagaagtcttgtgggacagagacttgagttaggaagccctcagtcacttgccttccacggtggccagccctgctgccatcattggctgaagcaccaccaggattcacggcacccaactgcttcagggtacttcgtagactctgcctcactacatgtcgaaagagttatttgagttctcttctgtttttttttaatttgttgttgttgttactgttttgatacctcggaaacacctccgttgacagttgttttggataggttgggtgtaccccatggctgcctctgaaggcagtgtctattttgagaggatggcttacctcttctttgtgaaaatactatctcatttcctggaaataaaatgtaaaacctgt

SEQ ID NO: 192 - DNA, 310 bp, Homo sapiens
cgggaggcgcggcctggcctcgcactcaaagccgccgcagcgcgccccgggctcggccgacccggcggggatctaggggtgggcgacttcgcgggaccgtggcgcatgtttcctgggagttactgatcatcttctttgaagaaacatgaagttacactatgttgctgtgcttactctagccatcctgatgttcctgacatggcttccagaatcactgagctgtaacaaagcactctgtgctagtgatgtgagcaaatgcctcattcaggagctctgccagtgccggccgggacgattgaattctagacct

SEQ ID NO: 193 - DNA, 971 bp, Homo sapiens
ggagaagcactatgggggcatgggccatgctgtatggagtctcgatgctctgtgtgctggacctaggtcagccgagtgtagttgaggagcctggctgtggccctggcaaggttcagaacggaagtggcaacaacactcgctgctgcagcctgtatgctccaggcaaggaggactgtccaaaagaaaggtgcatatgtgtcacacctgagtaccactgtggagaccctcagtgcaagatctgcaagcactacccctgccaaccaggccagagggtggagtctcaaggggatattgtgtttggcttccggtgtgttgcctgtgccatgggcaccttctccgcaggtcgtgacggtcactgcagactttggaccaactgttctcagtttggatttctcaccatgttccctgggaacaagacccacaatgctgtgtgcatcccggagccactgcccactgagcaatacggccatttgactgtcatcttcctggtcatggctgcatgcattttcttcctaaccacagtccagctcggcctgcacatatggcagctgaggaggcaacacatgtgtcctcgagagacccagccattcgcggaggtgcagttgtcagctgaggatgcttgcagcttccagttccctgaggaggaacgcggggagcagacagaagaaaagtgtcatctggggggtcggtggccatgaggcctggtcttcctctgtgccccaagccagacgctacaagacttgcccagctatacccttggtgagagcaggggccatgttctgcacccttccctgggcctggccctgctcccctcaacagtggcggaagtgggtgtatgagagcggtgagttacgattgggccctatggctgcctttctcatttgacagctctgttggagtagggtctttgggcccaccaagagcaccacgtttagcacaagatcttgtacaagaataaatacttgtctagt

SEQ ID NO: 194 - DNA, 1699 bp, Homo sapiens
gaactcttgacctcaggtgatccacccgcctcagtctcccaaagtgctgggattacaggcatgagccaccgcgcccagcctaggataactttctgattcctctctgccagccgttttgcgtctcttggaaagccaaacggtgaccatgcttcttaatttatgccttcagggtctggcttctcctttctcccttcctttcctgtcacaccatgcatacatacatacaaatacacatccttcaaccatttattccatggcttatgagacctgcaaatgagttccacagtacggaaggcatagaccactaggcttcttaattgatgtcaaggcagatcttggtgagcaggtaaaaacctgctattgtccaccaagtttaatttaggtcctccaagttggagggttaagaacccaggcaaagctgctgctgaatctatggaggaggctggccctgggacatcaaactaggggttaactggattgaatgaggagtcaacgctcagggacattctaggtctttacaggtcagacagaagagaggtttttaccattggagggaaatggaaagatggtataaataggatcccttcatgaagcaacccagaggcctctctgcagcgtgtagggtgtggggcgacagtattgtggggcttccattcatcttagtacaaaacctcacctgctctgagcctggaaatgggagggcttcacgcaccaagtaatgcacaccagaaaggcacttatatcctcagcaacatggcagttcctctttacttctctgcctccctctttctatattatcaggccatgcctattcctacaacctgagacaactcttggagtcagaagaaaactgaccagatcctggatctgagctgcctgctccaggcctagaaatccccaaaggctggcactgagctgtgactgctttaacagcccccaagatttggtcagtttgaggtggtggagactcagatttgttgctgaaagttcagtaacacagtcctggtctttggccctagagaaactttttatatgagaagtgttctctatatacatgtttgaggtgactctggaatggattatgaggtcatatctcaaaatgtcagaaaacgttatagagcactcgaacttttgtatttgctgcttaacctcaatattacagccacaaacaaggggtaccaagacaaagtataactgagcataagcagaaaatgttaaccctccaggtttctttcttaagcacaataaaagtgggagcgaacaacacaaggatatttttacatttgacccgtctcaaaagtagcacaccctatccttgtgccattatttgtacaaggaaatatatgattagaaggaatagaacccccagttgtcatcagcttttttagacaccacaggttgtagcagtttgaacaaactgaaaactttatacttctgtgtgagctgaactcaagtttcagaataatcatcgccatgtgggaggctttttgttaaatgcagaagaaatttcaaaatattgtatttatatctgccttccactgctgccaatttagtaagcatctcctatacaatcgacaataaacagcaaatgatgcagttcatagagtattttgcacttggggaaaaatatgtatctgaattgtaaaaagaaatgtttggattttgtatgtcttttttattattattaaaatactaaatg

SEQ ID NO: 195 - DNA, 2902 bp, Homo sapiens
  misc_feature 1293: n = a,c,g, or t
ggcaaatataatactaacaaataacacttgagactaaattttaggtgatgaaaacattatgattatgaatcttcctgggaaacgtgggtcaatcatgtctatctccttgaaatctggcaccgctaggtttcaggaagccatttatggtgtgtgtaccagttaggcttagatgggacttcatttaacaggaagagcaaaataaaattagttttaagatggtagaagtttatttgtccctaacagaaaaggaattcataagtaggctgtacaggcctcctatgaccacttaactatgtcatcatggctcatattttctgctttgtcattcttagcttgggctttccaaattcaagggttgagatgatgactagagttccacctattatgtcaacattcaaggctgtgctcgctactcccttttaagaatttcccatagacacatacatacttctgcttaaatgtgattggccagacttagttacatgaccatagccaactatgaaggtgaggctgggagcttcttagcagaacacattgtccaggattctattactaaagaagaataaaactggatattgaaagacaattagcatgaaaagcaagcatctgaaatagtcatgccatacaaattacagggtgtttattgcattacactgcactatattcactcaagcatttgtatgtgttagtgtcctctttctaggtgactttatgagtctggatgtgtatgaaggaaaaatggtggcaagcatcccaaacttacctgtctgtaaactgagggtagatagtcaaatgcaggaaagtcaggaaagaaagttgaataaatattctaaaactagcctcaaaaatcagagattgactgcagacgctgagataccaatagattcacatctcgctttaagaaccctttcatatagtaaatctgagatacagtggcaaaaaagaggttgcgaatagcagctcccaagcaaaaaagtctatttaatgcatatttataatgcaaatacttaatgggatatggggaaatgatgatgacccccctctcttactgtaattcatatacagagagagtgtaccccatgagcagcagtagtgtgcttgaactgatggtaagtagaattaaagatggaaggaaaacttactggaaaaagagaaaaactacagcaaatttgtttaattattttttcaacgtcgtgtgagaaatggtctttgtttcctgtgcaaaagcaaatattatactaaaggagtctgaaaactaatacgtagtacaagagagtccataaatactctgtngtatttgttttcttcactctgcagtttttaacacatgcctaatatattaggttggagtaaaaatttgataagtatagttattcagaatttattgtcacattccttggatggtagtattgctgatagtagtcaaacttacagaaaatatagaattcaaaaggatggccattatttcactttgagacagatgtaattccacaaaaggaattttattccatttatctatcaatcaacttacattgtgttttttatggctttccttttcttaattttttcaatttacttaatgagacaaataaattataacccacttggccagcacctttttttaagaaaataaatgtttcctcaacctactgatgattaatatgaagtggtgtgtgttgtggtgttgacattttataaatgatgttttaactatgtatccaaatgaacttttggcacctgaatatatagaggtgattttatgtcaaaggtctggagggcatttgattttgctttcctcagtgtatagatgataggtgaagtttagcaatcccagaaaagagagcaaaaagaaggtggctgtgggctaccttttcggtgtaagaggggaggagtctaagtagaatcatggagatggagtgaattcacagaaatccagagggaagagttttgaggcagagggagtgatcaatactggtcaaagagcagcaaagaggttaagtacagcaaaagctggagaattaggaagccaggagaaaatgtgtcatcttaactgaactgacatgctgctggctgaaaccaggcacattccagttaagtaaacaaatgcaaaggaggatgagtcattgagttcacagtactccccaagaagcctttatggcaagcgaaggaaatgaggcagtattgggtctattaaggcctatatacacctgtgctgtccagtatgagagccagtggccatatagctattgagcacttcaaatgtagcttgcgtgaattgggctgtgagtgtaacatttatactggatttcaaagactcagtatgaaaaaatagaatgtaaagaatccattgaaatttttatatcgattacatgttgaaatgattactttgatatccctgatgaaatataaggtattattaatattaacttcacctgtatgtttttattttggaacacgttactaagatttttacgaaatgcacctttggcttgcatttgtggctcagtgtattctattggacagtcagtgcattatatactctgacttcagtttggcatctcaatttttgacaataacatatgaggggaaatcagaagcctttctaaaagctacagtttggctgggcgtgcaggctcatgcctgtaatcccaacactttgggaggccgaggcaggcagatcacctgaggtcaggcgttcaagaccagcctgaccaataaggtgaaaacccgtctctactaaaaatacaaaaaattagccgggattagtggcacatgcctgtaatcctagctactcaggaggctgagacaggagaatagcttgaaccggggaggcagaagttgcagtgagccgagatcatgccattgcactccagcctgggcaacaagagagaaattctgcctc

SEQ ID NO: 196 - DNA, 3134 bp, Homo sapiens
gttcgagaccagcctgaccaatatgatgaaactaaaatttagtctctactgaaaatacaaaaattagccgggtgtggtggcatgtgcctgtaatcccagctacttgggaggctgagacaggagaattgcttgaagccaggaggtggaggttgcagtgagccgagattgcaccactgcactctgcctgggcaacaagagtaaaactccatttcaataaataaataaattaattaattaattaacaaaagcaaactaaaaagacacttctcagagctactttgcttatgtcgctagttcatggtagaaggaaaatggtgactgtagaaatggtcaaactgggatctttttcaggaaatgaaacacgtaatgtagacttctgtggaaagcatccatagacttatgtggaaagcatccatagacttccgtagaaagcatctgtagacttccgcagaaagcatccgtaaacttccgtagaaagcactgatgatgttgtataaacagaccataaggagattgaagccctccatgtattctgtttgcccttggaatatatgtgcatgtgcatgtgcttgtgtgtttattttcatttgggtttatgccctatttttaatttgtaagcagaacaagaggcaaagagctctcatatgcccgtagaattatatagtcaggcttttcaggaattttttttttaatccttcaacatttatctttgcatcaaaaataaattttttaaaaaaagtaaataaggataaaagaaaaaccgagtaggtgggagagaaggaggaatttggagtcatgggaatgggcaggtgttcaggtgatttaaaaggagaagtaaaggcatgttcctggataaatgtcgatatgcattattaaatgaaacagtggtaaaatatagactgtcagaagcatttttcttccagagacatgaggagaattgaaatgcagtttcaaaggaggagtctctttcggtgtttcttcaatcatttttttgtttgaagctttaattacagtgctccttgctacctaatgctttcagtttaaaatgacatcacaaaagagaggggaagatgtaattgctcagatgaagggcagccatcacagcagcattgaggtatttactcaccagggagttcctgctacatgattcttttctagatcaacattttgtttttggaatgcttttgtatcatgcatatttgacatggtttgtctttagagtgattgctctgatactgctattgccagagcagataataaccttcgggaaataatgtattctgaaataaaggaactagttatttgcatagttttctctggattggataatgtgtacaggtggctagtggcttcctaaaggtttagtgttctaatcaaataaacttgtatttaaatacattaacacagaccaatacacgcacatagaagcacatgtgtacacatagataggtgcacatgcatgtgtacacatacatcactgtcatagctcttcatgcagaatactttgctattcagccccatcaacacatactttttgaaaatatgctcagcagaggggtacaagcatacagaggactcagaccccagtctcaacttcttcacagtctgatggggacagacttgggagcagagatgctatgatgggggaggctgtgtacagtgcagcctgaaaacagagtagaagaggggccctttctccttcgggcccctgggaagactccaggaggtgatggatgaactttgagctggtcattggtgaaagaacatggattagctgagcagaaaagaagaaggaatactggatgcagtaagtaaccactttgggactaaatttacaccaaaatgagtattagttcctttggttccaaatggttcagatgttctttaaaggcactgttcttactgcccagaggaaagagagtgagctgaaccatacatgcttgtagtaaagattgtatgtatgtcatatatgtatatctatatgtaatatatctacccatgattatacgttgtctataaagccccttcacacttttttttaacctcatagcagctcagcaggtcagtttaatatgatcattatttttcagctaaggaaagggaggctcacagagatacatggcccagtttccctccaatgatgttctgggactcactgctcttactcaggtctgtgctgcccattacctccgtgaggttagatcacaggttacaagttagatctctgatatccggatctcctgatggcattagcagcgtttagtcagtgactttcctgggcctgcctggatcactctcacttcatgtggatgatctctctcaggaagccatagattttgagcaaaaatgcagacttcccagaggctttgccgggtcctccatctcactcccctcaagaatttcaacaaatctgttaatgctattttgccatttctgtacttcaaagtgtttctgccaggcataccttgtctgtcccagctctgactctttggggctgagtaggtttacttgtttattttttggttcttacatgtctccaactccatgtggatttacatcctattgggtgaggttttgtttttccttgtgtctataggtgagaagatgtgaacatacagttaattgaaactaagtctagaatcatgaagccagaaggagaaatgtattagaattagaaatgacatcacaggccgggcgcagtggctcatgactgtaatcccagcactttgggaggctgaggagggcggatcacgaggtcaagttcaagaccagcctggccaacatggtgaaaccccgtctctactaaaaatacaaaaattatcagggcatggtggcacgtggctgtaatctcagctacttgggaagctgaaggaggagaattgcttgaactgggactcgggaggcggaggttgcagtgagccgagatcgcaccactgcactccagcctgggctgcagagcgagactccatctcaaaaataaataaataaataaaagaaataaataaaaaataaagaaaaaaaagaaatgacatcacaaaaaagggctggctcctcataaagcagtcttcacacacagaatgtatgctgtgtgaccaggaatttgtagcagctgagaaaccatagttgttcataag

SEQ ID NO: 197 - DNA, 3323 bp, Homo sapiens
ggaggagagaagaggaggtggagaaggcttgggctcgcgccgctgaagtcggcttacccgctggccgcctcctgacaagcgggagggatccgcggtggacccagggaagcggaggagcctggcggccaccccctcttcctcacttccctgtactctcatcgctctcggcctccgacacgaaaaggaagcaaatgagctgatggaagatctgtttgaaactttccaagatgagatgggattctccaacatggaagatgatggcccagaagaggaggagcgtgtggctgagcctcaagctaactttaacacccctcaagctctacggtttgaggaactactggccaacctactaaatgaacaacatcagatagcgaaggaactatttgaacagctgaagatgaagaaaccttcagccaaacagcagaaggaggtagagaaggttaaaccccagtgtaaggaagttcatcagaccctgattctggacccagcacaaaggaagagactccagcagcagatgcagcagcatgttcagctcttgacacaaatccaccttcttgccacctgcaaccccaatctcaatccggaggccagtagcaccaggatatgtcttaaagagctgggaacctttgctcaaagctccatcgcccttcaccatcagtacaaccccaagtttcagaccctgttccaaccctgtaacttgatgggagctatgcagctgattgaagacttcagcacacatgtcagcattgactgcagccctcataaaactgtcaagaagactgccaatgaatttccctgtttgccaaagcaagtggcttggatcctggccacaagcaaggttttcatgtatccagagttacttccagtgtgttccctgaaggcaaagaatccccaggataagatcctcttcaccaaggctgaggacaatttgttagctttaggactgaagcattttgaagggactgagtttcttaaccctctaatcagcaagtaccttctaacctgcaagactgcccgccaactgacagtgagaatcaagaacctcaacatgaacagagctcctgacaacatcattaaattttataagaagaccaaacagctgccagtcctaggaaaatgctgtgaagagatccagccacatcagtggaagccacctatagagagagaagaacaccggctcccattctggttaaaggccagtctgccatccatccaggaagaactgcggcacatggctgatggtgctagagaggtaggaaatatgactggaaccactgagatcaactcagatcaaggcctagaaaaagacaactcagagttggggagtgaaactcggtacccactgctattgcctaagggtgtagtcctgaaactgaagccagttgccgaccgtttccccaagaaggcttggagacagaagcgttcatcagtcctgaaacccctccttatccaacccagcccctctctccagcccagcttcaaccctgggaaaacaccagcccaatcaactcattcagaagcccctccgagcaaaatggtgctccggattcctcacccaatacagccagccactgttttacagacagttccaggtgtccctccactgggggtcagtggaggtgagagttttgagtctcctgcagcactgcctgctatgccccctgaggccaggacaagcttccctctgtctgagtcccagactttgctctcttctgcccctgtgcccaaggtaatgatgccctcccctgcctcttccatgtttcgaaagccatatgtgagacggagaccctcaaaaagaaggggagccagggcctttcgctgtatcaaacctgcccctgttatccaccctgcatctgttatcttcactgttcctgctaccactgtgaagattgtgagccttggcggtggctgtaacatgatccagcctgtcaatgcggctgtggcccagagtccccagactattcccatcgccaccctcttggttaaccctacttccttcccctgtccattgaaccagccccttgtggcctcctctgtctcacccttaattgtttctggcaattctgtgaatcttcctataccatccacccctgaagataaggcccacatgaatgtggacattgcttgtgctgtggctgatggggaaaatgcctttcagggcctagaacccaaattagagccccaggaactatctcctctctctgctactgttttccccaaagtggaacatagcccagggcctccaccagtcgataaacagtgccaagaaggattgtcagagaacagtgcctatcgctggaccgttgtgaaaacagaggagggaaggcaagctctggagccgctccctcagggcatccaggagtctctaaacaactcttcccctggggatttagaggaagttgtcaagatggaacctgaagatgctacagaggaaatcagtggatttctttgagctaggagaataagagtctggagactgggagccttcacttcggcctccgattggtggcgcatagggtgtaaccaataggaaacccctaaagggtacttaaaccccagattttgcaactggggctcttgagcagcttgctttagcctgctcccactctgtggaatatacttttgcttcaataaatctgtgcttttattgcttcaaaaaaaaaaaaaaaaaataggcctctttggccgggccccggaactagctttttttcttttcctctaggcagagaagaggcgatggcggcgatggcatctctcggcgccctggcgctgctcctgctgtccagcctctcccgctgctcagccgaggcctgcctggagccccagatcaccccttcctactacaccacttctgacgctgtcatttccactgagaccgtcttcattgtggagatctccctgacatgcaagaacagggtccagaacatggctctctatgctgacgtcggtggaaaacaattccctgtcactcgaggccaggatgtggggcgttatcaggtgtcctggagcctggaccacaagagcgcccacgcaggcacctatgaggttagattcttcgacgaggagtcctacagcctcctcaggaaggctcagaggaataacgaggacatttccatcatcccgcctctgtttacagtcagcgtggaccatcggggcacttggaacgggccctgggtgtccactgaggtgctggctgcggcgatcggccttgtgatctactacttggccttcagtgcgaagagccacatccaggcctgagggcggcaccccagccctgcccttgcttccttcaataaacatcacaggacctgggactgcacagg

SEQ ID NO: 198 - DNA, 1225 bp, Homo sapiens
ccgacgatgaggccggggacgggagctgagcgtggaggcctcatgatggggcaccctggcatgcattatgccccaatgggaatgcaccctatgggtcagagagcgaatatgcctcctgtacctcatggaatgatgccgcagatgatgccccctatgggagggccaccaatgggacaaatgcctggaatgatgtcgtcagtaatgcctggaatgatgatgtctcatatgtctcaggcttccatgcagcctgccttaccgccaggagtaaatagtatggatgtagcagcaggtacagcatctggtgcaaaatcaatgtggactgaacataaatcacctgatggaaggacttactactacaacactgaaaccaaacagtctacctgggagaaaccagatgatcttaaaacacctgctgagcaactcttatctaaatgcccctggaaggaatacaaatcagattctggaaagccttactattataattctcaaacaaaagaatctcgctgggccaaacctaaagaacttgaggatcttgaaggataccagaataccattgttgctggaagtcttattacaaaatcaaacctgcatgcaatgatcaaagctgaagaaagcagtaagcaagaagagtgcaccacaacatcaacagccccagtccctacaacagaaattccgaccacaatgagcaccatggctgctgccgaagcagcagctgctgttgttgcagcagcagcagcggcagcagcagcagcagctgcagccaatgctaatgcttccacttctgcttctaatactgtcagtggaactgttccagttgttcctgagcctgaagttacttccattgttgctactgttgtagataatgagaatacagtaactatttcaactgaggaacaagcacaacttactagtacccctgctattcaggatcaaagtgtggaagtatccagtaatactggagaagaaacatctaagcaagaaactgtagctgattttactcccaaaaaagaagaggaggagagccaaccagcaaagaaaacatacacttggaatacaaaggaagaggcaaagcaagcttttaaagaattattgaaagaaaagcgggtaccatcgaatgcttcatgggagcaggctatgaaaatgattattaatgatccacgatacagtgctttggcaaagttaagtgaaaaaaagcaagcctttaatgcctataaagtccagacag

SEQ ID NO: 199 - DNA, 2671 bp, Homo sapiens
tttttttttttttttttttttttgttttgaatagattttttagttttattgaaatcttacatgaacaagaaattggaaatacaatcacatcaaagaacaaattgtcacggcttttgacgtttaagccaaacaaattttgtagggcagatttcaaaaaggtgtgaagttataacaatttaaaaacacagttaacctacttctaggaatgcaaaacatacaatcataggttattttcaatacaagaaaacttaaatttgtttgctttaatttcttaaaactactaagacaaagcactagcttgtatttttatttacagcatactccatactcctatgtaatctatcccaaatccaaaaaaatgaaactgtccaaaaccaaaggttctgcaaaatcatgatttaacagtgtgcccagcttgttttgaagctaaaatgaagcctgaaacgataaaagcattgtaatccccagaataagggaactctgcaagcccaataatgtccaagagcatttatgaaaagaggaaaaataaaaagacttgagtatatacacaatagtgatttcttcagcccaatacaaatggcagcaaaatgctacttaaagatgaaacagttaagccaatttttttttttgaagaatgtagatctagagccaatcgtatcttgccagtatcattttcaagcccttacttgtctacttccactgttgcccataagtatcctgataaaattcctggttgtcattattgtaaccatagttaccagaatagtcaccaccttgctgaagcggctgctgagcgatgggttgggaaccccagttctgttggttgttggtctgacgacgcttggaatcaggctggttgtaccatctgcctttctcttgcctcctacattgcccccacgattgccccgagatccacgggaaccacggcctctctgctgttgagcaggaccccctctgccacccctagagcctcttggtggtcccaaaggtgcccccctctgtgaatagccagctctacctcttggaggtggtgctcccctcccccttggtggtggtggagcacctcgccctccccttcctcctcctcttcctcttactgcatagccatcatcatagccgtagtagggatcttcatagcctccacgatagtcgtgataatcataaccatagtaatcatcatagtaatcttcatagccgtagtaatctggagggtagccatatccacctctccccccaccacgaccccgacctctaattggaggtggcatgcgaggaggagggtggtagtaataatcttcatacgcagtgcttctggaggcctgtctagcagcttggcgctctttccttttcttgtctggtggcttggctaagactatttcaattcttccccttctatttctttgccattcatttcatccatagccttaacagctgctcctctgtcttcaaaatgaacaaatgcataatctttcaacttctttactctttcgagttttccaaattcagaaaatgacttttccaatatttcttctgtcaccgtagtagccaagtttctcacaaacaaaacttttaccttagccatgacttctggatctggttcttccacagggtcagcccattcaactgtaactacatttccccacacttttacttttccactcatcagccggcgtctggcttgtgctgctgacttgtgatcctcatattcaaggaagcagaacccccgattcttctttttgtcatcgggttgatgatagagaataacgtccaccaaaccctctgtgactttactgaattcttccaaaatgttttctttagtcttattcttcggaatggatccaacaaaaagtctgttgtttgccacagaaatgcacactccaaggtgtttaccagggcgaatttcatagctgtcacacagtttcacggcttcctgtgcagcttcctttccacagaaggtgataaatgcataccctctattctgaccggacagtggatccatcataagacgtagatcccaaatgggtccggccttctcaaaaaggggcaccaactcatcctcatataaatcccttggtattttgcctacaaatacctccgttccaattccaggttgcacgccagagtacacactgtctggtggaggaccaccatacttcctctgtcctgtggttacatccagagtataaccagttctctcaagcaaggccttgatcttcgcttcatcaggtccctttgtggactcttgcaccttgctcccctgtttctctctctgcctgtaggtcttcataactccacataaaaatgcacttttgttctgaacatgtgataagtcactttccttgaactgctgtagtacagacagagctccttcttcattaaattccctgagagcatcaattgctctttcatcaagatcgacataagctaccaatcctgtctgaaatatttcatcaagtctttctgccaccttctgtgggaggcctgcctctatcagtgtcttgtagtgttctgtgtgagttacactggaagtatccattggttcttcctcttcttttaactgtaccgcattaccattcacctgattagccattttattatgcagggcagagcgggggccggcagccgggcccgtgagaatcagcgcgaggcgtcccgattgaattctagacct

SEQ ID NO: 200 - DNA, 1942 bp, Homo sapiens
ctgatatgttatcaagatggtttgaagaagcaagtgaggttgcacaaagcaatagaggacgaggaagatctcgacccagaggtggaacaagtcaatcagatatttcaactcttcctacggtcccatcaagtcctgatttggaagtgagtgaaactgcaatggaagtagatactccagctgaacaatttcttcagccttctacatcctctacaatgtcagctcaggctcattcgacatcatctcccacagaaagccctcattctactcctttgctatcttctccagacagtgaacaaaggcagtctgttgaggcatctggacaccacacacatcatcagtctgataacaataatgaaaagctgagccccaaaccagggacaggtgaaccagttttaagtttgcactacagcacagaaggaacaactacaagcacaataaaactgaactttacagatgaatggagcagtatagcatcaagttctagaggaattgggagccattgcaaatctgagggtcaggaggaatctttcgtcccacagagctcagtgcaaccaccagaaggagacagtgaaacaaaagctcctgaagaatcatcagaggatgtgacaaaatatcaggaaggagtatctgcagaaaacccagttgagaaccatatcaatataacacaatcagataagttcacagccaagccattggattccaactcaggagaaagaaatgacctcaatcttgatcgctcttgtggggttccagaagaatctgcttcatctgaaaaagccaaggaaccagaaacttcagatcagactagcactgagagtgctaccaatgaaaataacaccaatcctgagcctcagttccaaacagaagccactgggccttcagctcatgaagaaacatccaccagggactctgctcttcaggacacagatgacagtgatgatgacccagtcctgatcccaggtgcaaggtatcgagcaggacctggtgatagacgctctgctgttgcccgtattcaggagttcatcagacggagaaaagaaaggaaagaaatggaagaattggatactttgaacattagaaggccgctagtaaaaatggtttataaaggccatcgcaactccaggacaatgataaaagaagccaatttctggggtgctaactttgtaatgagtggttctgactgtggccacattttcatctgggatcggcacactgctgagcatttgatgcttctggaagctgataatcatgtggtaaactgcctgcagccacatccgtttgacccaattttagcctcatctggcatagattatgacataaagatctggtcaccattagaagagtcaaggatttttaaccgaaaacttgctgatgaagttataactcgaaacgaactcatgctggaagaaactagaaacaccattacagttccagcctctttcatgttgaggatgttggcttcacttaatcatatccgagctgaccggttggagggtgacagatcagaaggctctggtcaagagaatgaaaatgaggatgaggaataataaactctttttggcaagcacttaaatgttctgaaatttgtataagacatttattatatttttttctttacagagctttagtgcaattttaaggttatggtttttggagtttttccctttttttgggataacctaacattggtttggaatgattgtgtgcatgaatttgggagattgtataaaacaaaactagcagaatgtttttaaaactttttgccgtgtatgaggagtgctagaaaatgcaaagtgcaatattttccctaaccttcaaatgtgggagcttggatcaatgttgaagaataattttcatcatagtgaaaatgttggttcaaataaatttctacacttgccatttgcatgtttgttgctttctaattaaagaaactggttgtttt

SEQ ID NO: 201 - DNA, 628 bp, Homo sapiens
gccgctttgattttcttttgtggacatctttatttggaacataattgtctttagggttgatttgtatataagtaattggcctgtgattgtttcttttttggttggaagttatcattttgacattacttgtgattctgtgttcagcactattgtgatgtgttcaacctctgcactcgcttacacaataggatatgccaattgtgtgtggtgtaatgttattttgatttttttccatgttattgatgaaggatcatgcacctaacacatactaacttttttaatgttaggcatatttttagtatactttctcttattctttcttctcctccaaccttttacccatcctccttcctttccctcattcctgttgttatttgagaatgagggagaaacagtattttacatttatgtaattaggcttttccgttagttctcaaggatcctcttttggctcttgggaaagaattgtacctgtacaaggcaattatagaatgcgaactgctttgcctcattccatactgatcatcccagctgaacaatttgaaaactgttctgcctttttgttacatgaatctgtcagaaatatatttttaatttaatataaatgaaattcaataaaatatgaaac

SEQ ID NO: 202 - DNA, 1877 bp, Homo sapiens
gcgagaggagggggctcggccgcgggagccccgcggagtgggggcagcggctacttctggtactgctgttgggtggctgctccgggcgcatccaccggctggcgctgacgggggagaagcgagcggacatccagctgaacagcttcggtttctacaccaatggctctctggaggtggagttgagcgtcctgcggctgggcctccgggaggcagaagagaagtccctgctggtggggttcagtctcagccgggttcggtctggcagagttcgctcctattcaacccgggatttccaggactgccctctccagaaaaacagtagcagtttcctggtcctgttcctcatcaacaccaaggatctgcaggtccaggtgcggaagtatggagagcagaagacgttgtttatctttcccgggctcctcccggaagcaccctccaaaccagggctcccgaagccacaggccacagtcccccgcaaggtggatggcggagggacctctgcagccagcaagcccaagtcaacacccgcagtgattcagggtcctagtgggaaggacaaggacctggtgttgggcctgagccacctcaacaactcctacaacttcagtttccacgtggtgatcggctctcaggcggaagaaggccagtacagcctgaacttccacaactgcaacaattcagtgccaggaaaggagcatccattcgacatcacggtgatgatccgggagaagaaccccgatggcttcctgtcggcagcggagatgccccttttcaagctctacatggtcatgtccgcctgcttcctggccgctggcatcttctgggtgtccatcctctgcaggaacacgtacagcgtcttcaagatccactggctcatggcggccttggccttcaccaagagcatctctctcctcttccacagcatcaactactacttcatcaacagccagggccaccccatcgaaggccttgccgtcatgtactacatcgcacacctgctgaagggcgccctcctcttcatcaccatcgccctgattggctcaggctgggccttcatcaagtacgtcctgtcggataaggagaagaaggtctttgggatcgtgatccccatgcaggtcctggccaacgtggcctacatcatcatcgagtcccgcgaggaaggcgccagcgactacgtgctgtggaaggagattttgttcctggtggacctcatctgctgtggtgccatcctgttccccgtagtctggtccatccggcatctccaggatgcgtctggcacagacgggaaggtggcagtgaacctggccaagctgaagctgttccggcattactatgtcatggtcatctgctacgtctacttcacccgcatcatcgccatcctgctgcaggtggctgtgccctttcagtggcagtggctgtaccagctcttggtggagggctccaccctggccttcttcgtgctcacgggctacaagttccagcccacagggaacaacccgtacctgcagctgccccaggaggacgaggaggatgttcagatggagcaagtaatgacggactctgggttccgggaaggcctctccaaagtcaacaaaacagccagcgggcgggaactgttatgatcacctccacatctcagaccaaagggtcgtcctcccccagcatttctcactcctgcccttcttccacagcgtatgtggggaggtggaggggtccatgtggaccaggcgcccagctccccgggaccccggttcccggacaagcccatttggaagaagagtcccttcctccccccaaatattgggcagccctgtccttaccccgggaccacccctcccttccagctatgtgtacaataatgaccaatctgtttggct

SEQ ID NO: 203 - DNA, 2340 bp, Homo sapiens
aatcgggaaactgaaggtcacagcacggtcacagcagaggtggccgaacccagccctctgcgcgccagtgctgtgcggtctccacacccttacggtttcctagaatcagggatgttagtgtaagtctataggaatataggggggtggggggggtcaccttttgccttgaaatgggaagtcagtagccccttcctcctcctccctcctccccctcctctctggcagggatctcagatgaccgtggcctccctctcagagggggagaacgccagagccctggctggtgatgtgctggctgggggtgaatcccaatgagggtccctctcagagcgggagaacgccagagccctggatggtgatgcgctggctgggggtgaatcccaatgagggtccctctcagaaagggagaacgccagagccctggctggtgacatgctggctgggggtgaatccgaatgacagtgcagacgttctcccatccaccatgtctgagcttgggggaattgcctcatttaccctggaaaagaaacatggtccattagagggggaaagcccaggggtgaatcttcacgccccaaacagtgcccggtggggaggaggcacccgctccttgttgagtaaaaccacccatggagactggaacctcatctccctgggtcggggggtgttcaaggccacaggacaaggggagcaccctgggccacacaggcgtggaggtgtccccaccccttccacctgtcccccagacccaaagctctctccccaccctacctgcccacctggggctcctgtgccccctccccactccagaggccaccctacaagttgtcctcaaggtcatcctggagatgggatccaggacgtggggccatgactctctgggaccttgccacagcccccattcccctgcttgcagtctgcaaggacacctttgcagggattcttgtcctgctggccaccccacccacacctgtccctggccagcaggccgcctgcaagcgtcaggcacacagggacagacatggcgagcacagtgcaggcccggggcccacgggcaacatggaaccctgggaactgccctcccccttagctcacagtgcctgcggtagccactctaggtcgttggccttccttgaccactccatttaattctctctgctgtttgggttgggtttttccccttagttatctgtgggtttcctgtattttatgttaatatttctattaagaacatgttgggcatgtggacccaagcacctgggaaggaggtggcatctgagacagcctgatacgttcccgtctgtgcacccatggagatccaggcgtgggcccgtgtctgtccctggttgtaaattcgagggtctgcatatctgatgttcaggtagacctgggcgcctgggaacgaggccatcagctgccatgcacataacaaagagacaatgcattccttcttatttttcctttttaaaaatcgatgaatcatttgtgatgcttttaacaaagattaaatgaatttgatcagcttttgccttattgtgaagatactttcctcctttcctgaaatgcatgtgggtgcacacacaggcccctaggatcgtggtcccagaggtgaggtggctgaggacctcgtgcgagggacaaggaccaggccctacacgttgggacgttgaggaaggctgcacatggcagtggccttcaaagtaatgatctccccggtcggctctcaagcactttcacacatgtgggctcgttctgtcactcaaggccagcagaaggggaaccagaagtgtcagccaattttccagaagagaaacagagactcccagaggctgagggcctggaggtggtgcagcacagtcccacatctgatggggctcctttatttctgaaaggccatttgctttagtctttgagttgacagaaagaggcatggacttgtctatcccaattgatgctccagcctcaaaagctgtgcattcactatagctagccactgagtgtccacaccttctctgaaacttcaactctaatagctggaaaagaacactctttcttctcactctcacatggttagagagagagagagagagagagaggtggatgaacatactttacagatgtgttcacatttgctaagtggtccccaagccatttctggaaagaatgaggttgcaattgcctagtggctgctcagggggagagagctggcaaggggctgacagcagacaccctggcatcccagtgagcgtctgctgtgcctggaactgttgtccccaaatatggtcaacttgcgcgtgaaagtattttaagagctgtaataaaacaaggcattcttttcac

SEQ ID NO: 204 - DNA, 3428 bp, Homo sapiens
ggtcttttatggtcgattttgtcttttttcttcttttttccccattttttcaaggatggaaaggtcagagaaaaataaaataaaacatctttcaatagtctttcctggtaaaagcagcgtctctctgggctggggagtaaagggtgtggggcaaggggagtggggagaggctgaaaccttcccccaaaccccagttttagatcctttggtttccttctcccagaagatggcagaagggcatggtgggaacagcagggagaaaatatggtgatgacaaaccccagatgatcaaggggctgatgctcctggggcccagaggtaccaccagagccttctatgagacagtgctgggcaatgggggggccgcaggggcttcttgtgggctgcatagttggcttgagggctaaggagcttttcactttcccaaagtctgtgtgttcgagtgctggcttgtccatttggcatcttcccggacaggctggccggtgggtggtgtaaggggttggctgatcatggcagcaggcctgctggaagactgggaggggcaccgcttcctgccctcaccgccgccacctcctgctaccactgagtgtcgcttgtggttgccctcctcacccatggggggatctactcggaagtcttcaagacgtcggagtttgccgaggtattcttgcagtttggggtcaatgtccaaatttttggctttggaatatttcaagaaggcccagaacttctccagcccatacagttggccagcttcatagtccttcaccgtttcctcctgaaaatccttgaatatgtccagccggaacttcttttccaggccataactgtagtatcgaaaaaggcactccaaaccatatctgtagccttctttggcgtcctccagagccagctgcttgaactcctcatacatctttttgttgaagtgatctcggaggaagaaggaccagaagccgaagagtgtgttcatctcctgagactggccaatgccccaagcgtttccgctcattaaggcagcgcctacgatacttatggtagacgtgttgtgtgaagccattttccttgagcagttcatgggaaggatgctggaacttgggcaatgactgaggggtacagccatagctgccaactgtaggcgtcccttctgaggggctggagctgatggaagcagctctccaagggtgggtttgaactgtgtcttgtctttctttttcgaggcatcttggcatccagtgtccgtccttctttcaccactgggtaaaaccgtgatgtctggcttgagtctttgagctgtggtgtccggggagtgcgaggggtcctggtgttgcggtagtttggtgactctgggacagtggttggtagagagcgggcgatggtggagggctcaggagcaccaaacaacttgttggccagggcatccgtaggaacttgctggaaccgaggtggcccaggaggaacttcctggttgggatccacagggggctcaggggtcagtgtgtcaaactgctcccggctgatcatattgacctttttgaagttctcgacttcttgcttgatctgggaatactcaggttcaaacttttcagcccacaggtcctgctcatagtagaagaggccatcattaatgaccttggccagttcggcgctcatcttggcacgcgaggtgtggttgcctgtgcggtccccccctgggtgccggcgcatgtaatgtggtgtctgggtgacaatgaggatcttgttgacatccctgtcatcaatctcatagtcagattcctcatcagaccaggcagtgaaggtgttcttccgcccatccatctgctccatctcctcgtcaaacagaaaatccagttcctcttgctcatcctgatccttggacatcagctgctgggaaggcagctgctgaggcagagaggtcaggtgggaaaatctggactcctctgacttcttgggccgtgctggggatggccgaggcctcttcttcacttcaatccagttctcagaatccaggtcaggcaggctggcagacaggcccttgggtagtgtctttaggttgctgacctcctctgttttggttggcactggggtgactgcacgaggagagccaggtgccgactctgtctccttctggtagtgctgacggggaacacattcagggcagttgagaagctgggagaaatcagtctgtgaataatccactattgggggaagaggccacttttctggttcctccctcctacgaactttctcatcaacgatctccaccaccttgctgtcctttagggccgcaaagatgagtgaaatgtcagtggtaagggcctgcactcggtggaaggaagcaataagggtgatgggtaggaaaccatcagcatccattttccttcgcaggaagaagtctcgctctaaattgtccacgctgaagtagtattcaatctggcgcttgatgtagtctttgagcagttcctgatccacactgtaaagctcggtgctgctgacattgtcaaagtagtaggtgatgttgttcatgtacttgggcgtacgaggcccctccacaccatcaaactttcggtagccaaactggtagtcaaaatgggttcgagtgccaccccggccgcgtccccggccgcgaccacgcccccgtccacggccacggaaggaagcccgcgccccaccagccccatcactcttcacactcgatgtctcatcctggtcgtgccaggcaggctccggtttgatctctggttgccaggctggggtggggggggccacgggcacgtaggtggcagactcagaccctttgatctctccgcgattggcaggtatgtgtctaggttccggtgggcgagtggggcgtgaagccagtttctctctgggcacttcaggcttcatgtctatttgtaatggaacccacttgtgtttgtttcctttcttcttctgcccgcctcgctggcaatcctcatctccattcttttcctcccctgattcatctgatttggtttttggactctccttactatcactcccttctcctttctcctgttccttcatgtccttcttgggtggcagtttacgggtaggctgaggcttgtgggactgtggctgaacactcttgtgggctatctctccaggtgtgggccaattgattgcatctccaaagtcaccaaccttgctgcctttgcgctgtttaggaacagctgccctcaccaccttggctggagcagagtgttctgggggggactgtccgttcacggtggtcaggaccggcggcaatgcgttcttagtccacgggttcaccttgggcgggggggcttccacgaagtcccggcgccccgcgcccgcggctccggcagctcctccgccagcgcctggctcgccgccgccctcctccccgtcgctgatggccgggccttcggcgccgggcagctgca

SEQ ID NO: 205 - DNA, 1887 bp, Homo sapiens
gatcttgaaagttcaggcctcacacaagccttctgaaattctggaatgcagtgaaacttctttacaggaagtagctagtaaagcagcagtactaacagagacccctcgtacaagtgacggtgagaagactttaatagaaaaaatgtttggaggaaaactacgaactcacatacgttgtttgaactgcaggagtacctcacaaaaagtggaagcctttacagatctttcgcttgccttttgtccttcctcttctttggaaaacatgtctgtccaagatccagcatcatcacccagtatacaagatggtggtctaatgcaagcctctgtacccggtccttcagaagaaccagtagtttataatccaacaacagctgccttcatctgtgactcacttgtgaatgaaaaaaccataggcagtcctcctaatgagttttactgttctgaaaacacttctgtccctaacgaatctaacaagattcttgttaataaagatgtacctcagaaaccaggaggtgaaaccacaccttcagtaactgacttactaaattattttttggctccagagattcttactggtgataaccaatattattgtgaaaactgtgcctctctgcaaaatgctgagaaaactatgcaaatcacggaggaacctgaataccttattcttactctcctgagattttcatatgatcagaagtatcatgtgagaaggaaaattttagacaatgtatcactgccactggttttggagttgccagttaaaagaattacttctttctcttcattgtcagaaagttggtctgtagatgttgacttcactgatcttagtgagaaccttgctaaaaaattaaagccttcagggactgatgaagcttcctgcacaaaattggtgccctatctattaagttccgttgtggttcactctggtatatcctctgaaagtgggcattactattcttatgccaggaatatcacaagtacagactcttcatatcagatgtaccaccagtctgaggctctggcattagcatcctcccagagtcatttactagggagagatagtcccagtgcagtttttgaacaggatttggaaaataaggaaatgtcaaaagaatggtttttatttaatgacagtagagtgacatttacttcatttcagtcagtccagaaaattacgagcaggtttccaaaggacacagcttatgtgcttttgtataaaaaacagcatagtactaatggtttaagtggtaataacccaaccagtggactctggataaatggagacccacctctacagaaagaacttatggatgctataacaaaagacaataaactatatttacaggaacaagagttgaatgctcgagcccgggccctccaagctgcatctgcttcatgttcatttcggcccaatggatttgatgacaacgacccaccaggaagctgtggaccaactggtggagggggtggaggaggatttaatacagttggcagactcgtattttgatcctgagagagtccaaaatgcactggtcacgaaacgtctaatactatgactgttaaaatgtcagactataacaaatatctatcttttatttttcattagacccttatacttcaagagaacacactcagtgcttgtttttattttcttgacacatttattaacaaaatgcatcatggaaaaaaaaatctacctcttaaaattccatttgcttttatggttagacatgcttgaccaaaaatgttcagaagaaaatatgtacctggtccctaattaagctgcgttaaatttggtagaagcatttaaatggtctatcttcagttttactgaacaaaaaatgtaatttatttagcattctttataaaagaattgatgctagaggt

SEQ ID NO: 206 - DNA, 876 bp, Homo sapiens
  misc_feature 652: n = a,c,g, or t
gcgggcagtagccgctgaggggattgcagataaccgcttcccgcacggggaaagtctaccctgcctgccactttctgctcgccgtcagcgccggagctcgccagcatgtctgtggtaccgcccaatcgctcgcagaccggctggccccggggggtcactcagttcggcaacaagtacatccagcagacgaagcccctcaccctggagcgcaccatcaacctgtaccctcttaccaattatacttttggtacaaaagagcccctctacgagaaggacagctctgttgcagccagatttcagcgcatgagggaagaatttgataaaattggaatgaggaggactgtagaaggggttctgattgtacatgagcaccggctaccccatgtgttactgctgcagctgggaacaactttcttcaaactacctggtggtgaacttaacccaggagaagatgaagttgaaggactaaaacgcttaatgacagagatactgggtcgtcaggatggagttttgcaagactgggtcattgacgattgcattggtaactggtggagaccaaattttgaacctcctcagtatccatatattcctgcacatattacaaagcctaaggaacataagaagttgtttctggttcagcttcaagaaaaanccttgtttgcagtccctaaaaattacaagctggtagctgcaccattgtttgaattgtatgacaatgcaccaggatatggacccatcatttctagtctccctcagctgttgagcaggttcaattttatttacaactgaattcctgcgcagtggagaagtaaaagaagccgcttgtctctgtgagcacagctatatacagtgtagaataaatgtggtagaaaagtt

SEQ ID NO: 207 - DNA, 786 bp, Homo sapiens
ctcatccccagcaaacccttggcccggagatgcttccccgctatccacgcctacaagggtgtcctgatggtgggcaatgagacgacctatgaggatgggcatggctcccggaaaaacatcacagacctggtggagggcgccaagaaagccaatggagtcctagaggcgcggcaactcgccatgcgcatatttgaagattacaccgtctcttggtactggattatcataggcctggtcattgccatggcgatgagcctcctgttcatcatcctgcttcgcttcctggctggtattatggtctgggtgatgatcatcatggtgattctggtgctgggctacggaatatttcactgctacatggagtactcccgactgcgtggtgaggccggctctgatgtctctttggtggacctcggctttcagacggatttccgggtgtacctgcacttacggcagacctggttggcctttatgatcattctgagtatccttgaagtcattatcatcttgctgctcatctttctccggaagagaattctcatcgcgattgcactcatcaaagaagccagcagggctgtgggatacgtcatgtgctccttgctctacccactggtcaccttcttcttgctgtgcctctgcatcgcctactgggccagcactgctgtcttcctgtccacttccaacgaagcggtctataagatctttgatgacagcccctgcccatttactgcgaaaacctgcaacccagagaccttcccctcctccaataaatcccgtttttgggtc

SEQ ID NO: 208 - DNA, 1439 bp, Homo sapiens
atttcttgttcacccttttaccatatggggttgcagctttattcagtgacctcgtcattagccttcccaccttgggtgggccccaggctgcgtctctttccccacacctcatgtagctatcctggtggaggttcaagggctcccggtgaaggcagcttcagtgattgattgcttagcttccaggccttgtttttacttgaattttgctcttggtggattccttccttttgtgcctggtcagtgatgtttgtaaaaatcttaaaaatctcatctagcagcagagttgttaatttggagggttgttcagggtatctagtttgccacaatgcagttcacaacctggtttggaacataacattgtgaattaggtgttgagtctttgcattccttaatcatggcaatccttgtcattgttcctgtgatataattgcagactttcaaatctttgttccaaaaggtttccattttgcagtccctacttcaggttatgattaaaacaacatgtcactctagcaataacgaagcgtggggagctgctaagatgggtttgaactataatgctggcatcggcattactcagatcttttttgtttttttgatacagaatttcgctcttgttgcccaggctggagtgcaatggcacgatctcagctcaccacatcctctgtctcccaggttcaggagaattgctcgaactgggaggcagaggttgcagtgagccaagattgtgtcactgcactccagcctgggtgacagagtgcgactccgtctcaaaaaaaaaaaaaagctcttgttatactatattgaatgatcctgcatggtttatttacataatgtaatatctatatgcacagctagatcctgaatgaataatataattggtatatgaggacattacggaaacagtatgctacgtcattcaagttgtaaagtggcgatatttggtaggaccttttaaacatgatacttaaaaaagtacatatatacacacatctgcaaaaactaaaaatcaccttattcataattagttattaataccttaaatagagcattccaaataaaagtgttaaattttggatgactatttagaaaaaaaaatggaatttatcatttcaatatggtaacattggttttatcatgctggttggaattctagttaaaagttatgtctttgattaataaaaggagaaaattgttaatggtgtgtgtctgtaggcaacagcttaggctttgccatcacacagcatctcactggtaaatcattaataattacaggccttatcataacattatgaaaattaaatgaattaaaacttataaaatgcttagtgtggtatctggcacatggtaaacactcaataactaccagtcatcttttagagtgggggaggataaaaacagtctgccagcctggcaacatagggaaaccctgtctctac

SEQ ID NO: 209 - DNA, 2888 bp, Homo sapiens
ccgagatgttatctgggaagaaggcggcagccgcggcggcggcggctgcagcggcagcaaccgggacggaggctggccctgggacagcaggcggctccgagaacgggtctgaggtggccgcgcagcccgcgggcctgtcgggcccagccgaggtcgggccgggggcggtgggggagcgcacaccccgcaagaaagagcctccgcgggcctcgccccccgggggcctggcggaaccgccggggtccgcagggcctcaggccggccctactgtcgtgcctgggtctgcgacccccatggaaactggaatagcagagactccggaggggcgtcggaccagccggcgcaagcgggcgaaggtagagtacagagagatggatgaaagcttggccaacctctcagaagatgagtattattcagaagaagagagaaatgccaaagcagagaaggaaaagaagcttcccccaccaccccctcaagccccacctgaggaagaaaatgaaagtgagcctgaagaaccatcgggtgtggagggcgcagctttccagagccgacttcctcatgaccggatgacttctcaagaagcagcctgttttccagatattatcagtggaccacaacagacccagaaggtttttcttttcattagaaaccgcacactgcagttgtggttggataatccaaagattcagctgacatttgaggctactctccaacaattagaagcaccttataacagtgatactgtgcttgtccaccgagttcacagttatttagagcgtcatggtcttatcaacttcggcatctataagaggataaaacccctaccaactaaaaagacaggaaaggtaattattataggctctggggtctcaggcttggcagcagctcgacagttacaaagttttggaatggatgtcacacttttggaagccagggatcgtgtgggtggacgagttgccacatttcgcaaaggaaactatgtagctgatcttggagccatggtggtaacaggtcttggagggaatcctatggctgtggtcagcaaacaagtaaatatggaactggccaagatcaagcaaaaatgcccactttatgaagccaacggacaagctgttcctaaagagaaagatgaaatggtagagcaagagtttaaccggttgctagaagctacatcttaccttagtcatcaactagacttcaatgtcctcaataataagcctgtgtcccttggccaggcattggaagttgtcattcagttacaagagaagcatgtcaaagatgagcagattgaacattggaagaagatagtgaaaactcaggaagaattgaaagaacttcttaataagatggtaaatttgaaagagaaaattaaagaactccatcagcaatacaaagaagcatctgaagtaaagccacccagagatattactgccgagttcttagtgaaaagcaaacacagggatctgaccgccctatgcaaggaatatgatgaattagctgaaacacaaggaaagctagaagaaaaacttcaggagttggaagcgaatcccccaagtgatgtatatctctcatcaagagacagacaaatacttgattggcattttgcaaatcttgaatttgctaatgccacacctctctcaactctctcccttaagcactgggatcaggatgatgactttgagttcactggcagccacctgacagtaaggaatggctactcgtgtgtgcctgtggctttagcagaaggcctagacattaaactgaatacagcagtgcgacaggttcgctacacggcttcaggatgtgaagtgatagctgtgaatacccgctccacgagtcaaacctttatttataaatgcgacgcagttctctgtacccttcccctgggtgtgctgaagcagcagccaccagccgttcagtttgtgccacctctccctgagtggaaaacatctgcagtccaaaggatgggatttggcaaccttaacaaggtggtgttgtgttttgatcgggtgttctgggatccaagtgtcaatttgttcgggcatgttggcagtacgactgccagcaggggtgagctcttcctcttctggaacctctataaagctccaatactgttggcactagtggcaggagaagctgctggtatcatggaaaacataagtgacgatgtgattgttggccgatgcctggccattctcaaagggatttttggtagcagtgcagtacctcagcccaaagaaactgtggtgtctcgttggcgtgctgatccctgggctcggggctcttattcctatgttgctgcaggatcatctggaaatgactatgatttaatggctcagccaatcactcctggcccctcgattccaggtgccccacagccgattccacgactcttctttgcgggagaacatacgatccgtaactacccagccacagtgcatggtgctctgctgagtgggctgcgagaagcgggaagaattgcagaccagtttttgggggccatgtatacgctgcctcgccaggccacaccaggtgttcctgcacagcagtccccaagcatgtgagacagatgcattctaagggaagaggcccatgtgcctgtttctgccatgtaaggaaggctcttctagcaatactagatcccactgagaaaatccaccctggcatctgggctcctgatcagctgatggagctcctgatttgacaaaggagcttgcctcctttgaatgacctagagcacagggaggaacttgtccattagtttggaattgtgttcttcgtaaagactgaggcaagcaagtgctgtgaaataacatcatcttagtcccttggtgtgtggggtttgtttttttttttatattttgagaataaaacttcatataaaattg

SEQ ID NO: 210 - DNA, 1511 bp, Homo sapiens
aaagaagcatctgaagtaaagccacccagagatattactgccgagttcttagtgaaaagcaaacacagggatctgaccgccctatgcaaggaatatgatgaattagctgaaacacaaggaaagctagaagaaaaacttcaggagttggaagcgaatcccccaagtgatgtatatctctcatcaagagacagacaaatacttgattggcattttgcaaatcttgaatttgctaatgccacacctctctcaactctctcccttaagcactgggatcaggatgatgactttgagttcactggcagccacctgacagtaaggaatggctactcgtgtgtgcctgtggctttagcagaaggcctagacattaaactgaatacagcagtgcgacaggttcgctacacggcttcaggatgtgaagtgatagctgtgaatacccgctccacgagtcaaacctttatttataaatgcgacgcagttctctgtacccttcccctgggtgtgctgaagcagcagccaccagccgttcagtttgtgccacctctccctgagtggaaaacatctgcagtccaaaggatgggatttggcaaccttaacaaggtggtgttgtgttttgatcgggtgttctgggatccaagtgtcaatttgttcgggcatgttggcagtacgactgccagcaggggtgagctcttcctcttctggaacctctataaagctccaatactgttggcactagtggcaggagaagctgctggtatcatggaaaacataagtgacgatgtgattgttggccgatgcctggccattctcaaagggatttttggtagcagtgcagtacctcagcccaaagaaactgtggtgtctcgttggcgtgctgatccctgggctcggggctcttattcctatgttgctgcaggatcatctggaaatgactatgatttaatggctcagccaatcactcctggcccctcgattccaggtgccccacagccgattccacgactcttctttgcgggagaacatacgatccgtaactacccagccacagtgcatggtgctctgctgagtgggctgcgagaagcgggaagaattgcagaccagtttttgggggccatgtatacgctgcctcgccaggccacaccaggtgttcctgcacagcagtccccaagcatgtgagacagatgcattctaagggaagaggcccatgtgcctgtttctgccatgtaaggaaggctcttctagcaatactagatcccactgagaaaatccaccctggcatctgggctcctgatcagctgatggagctcctgatttgacaaaggagcttgcctcctttgaatgacctagagcacagggaggaacttgtccattagtttggaattgtgttcttcgtaaagactgaggcaagcaagtgctgtgaaataacatcatcttagtcccttggtgtgtggggtttgttttttttttttatattttgagaataaaacttcatataaaaattgaattctagacct

SEQ ID NO: 211 - DNA, 2039 bp, Homo sapiens
ctggggttcagtttcctgtggctggtgatgctgtggttaagtttgcttgaccccagcagcccgagggactgtctgagtcacagcacagcccctattgcgtggctgctggtgtgtggggtcagttccagcagatgaatgtgtcatgtggcacaccttgtcccttcccgcagcatttcctggttccccccagacccttgagcgctctttgggacccagaaggagtccttgcacagggaaggcttgaggtgagaagccgcttcccagactgtcagggccaggcctgggtctagaattcttgctgctgctttgcagagtcaacagcccatcagcccatgttttagaggggacactttggtcctcggttcccaccctcagcaagcaggcctccagcccgaggaaggcctctgccgtagtgacgttgccgtgtggggctgcgtggctgttccccttggctggagcattcagccaaccccagcgtcccccctgaggcgttcattggcagccccctaggactgcacgctggccccacggtaaccccccctcccccaccaacatcctgcagggatggggtcagtggttccaccttcacaggccactttgaagggtggattctttgaggcccctgccagtcggctccctgctcagctgctggcccgggcgacctgggactcagcaccaacggctgaagtttctcagctgggctctgacctggggtctggggcagggaacgaacatggtggctttgggctgagaggatgagggaggtctttcccaggtcaaattactttcctttggcctctgcctgaggctcgatttgcctctctggtccaatgggactgacactgttgtacaacctgacctgtggctgagggtgtctgggcttaagcatgtggaccccttcggtgtgtctggccttcctccatcgtcctgccctttggccttttggtttgaagccacaggtgtggcttctggccttagcagatggtatgcttgcggaccgcagcccagcatgccggtgggcccacagcccgagccagcccagagctgccggaagggccgcccttcccggccctggcggggtgctggacactggccattttcactagagtttgcctggcagggaccgatctctgccccctcctctccccaggcctctggctgcagtgatgccgcagaatcctgagccaggtgcctcctgagcagcccgtgcgcctctccacagcggcgtttgccacccaatgcggctcgcttcagatgctctgatgcagagggcatgcccatagtccctctgcagagcctcgcactggggccagggcaggcaccagccccaggcggccagtcggccacggcctgtcctcttcctcgtagcgtctgctcctcactttgtgttgatggtgacttaggagaatgttccgattttccatgatctaagcaggccacgtttaaaataacatcaaggcaagcgtacgtgtcaccctctgtactgacatctcctcccctgaaatgcttttcagtttgacagcccgtttcctagacaagtgcacctggggtttcaggaactttgtgttttttcggagggggttggtggggaggtcgggatgcctgggatcccttcctggagaggcaggctgtctctggaaaaagcgtcaattgcccacccgccaggcggaaagtcaccctgttcccagcgcggtttcagcatttaattttaagggagctaaggaagcgcggcgcgccccctggtggtggtaagccgccaacgcacctgggggctgcaaccccaccggacgggtggtccggagggaggctggagcggggaggcgaggagggggctgtgagtcctcagaggccctgggccaccacatttctggcagcgtttcccagacacccctctggtaggccatccctggatagcaagtgaattaacttaagggcactgtgatgggaagccttgcccccctctttttttttttttttttaatatctgcggaataaacccaatggttaatttttgaatgaataaaaggcttttgttgaat

SEQ ID NO: 212 - DNA, 1175 bp, Homo sapiens
gaagtccttatagtccagggcctgtttccctgtagcagctccttattgctggagaaggagaaaagtgcccaagatcctttcaggatatttggttttttgggcgcgacacaaatcgaggtgagggaagagagaggaaaatcccctgaatccctgcaggattaatttattcaaaaaggaaataaaaaatactcaatatgcaaaagtcttgtgaagaaaatgagggaaaaccacagaacatgccaaaggccgaggaagatcgccctttggaggatgtaccacaggaggcagaaggaaatcctcaaccttccgaagaaggcgtaagccaggaagcagaaggaaaccccagaggagggccgaatcagcctggccagggatttaaagaggacacacccgttaggcatttggaccctgaagaaatgataagaggagtagatgagcttgaaaggcttagggaagagataagaagagtaagaaacaagtttgtgatgatgcattggaagcaaagacattcacgcagccgtccttatcctgtgtgctttaggccttgaattcatttttgcctaatattaaaatctggccccagctttctttctgttagcattttctgatgtatctttgacctccattttacttttaatcatctgatgaaattttgttttaggtaatttccttggtaccagcatctcattggattttggattttgacccattttccaggtctatttttcaattggaaactttcacacatttgcatgggaatatgttcattccatgttgtaaagtaaaacataacaggttatggcaaagcagcatatttaatatcagctcacatatgtaggataaaattccaaactttgtgtgtgtgcgtgtgtgtatacatacatccatataacatatatcacaaacttaaccaagcttatttctgtgtggtgtgaaattttatttgttttcttctttttgttctttttgcttatatgtactttttaatgaacacgtgtctcacacacaaaaagaattaaggattttttttacaagtaagagtcaaataatttgcaaccagcttatgagggcaatgggggcacctaaactcttgatgaaagaactttaaaaagaaatgtaaacctcaaattacctctggatctcttagccagaggaataaactggcaattattacc

SEQ ID NO: 213 - DNA, 3163 bp, Homo sapiens
  misc_feature 2302,2303: n = a,c,g, or t
gcagggactctgatgcatatagggacaaacagcatattctatggcctaaaagagcagattgtacagaaagctaccctagagtccctgttggtggggaattgccaacgtattttctgcctccggaaaacaaaggactcaggatccacgaactcagcagtgatgattattctacagaagaagaggcccaaacccctgactgttccataactgacttcagaaaaagccacactctgtcctacttagtcaaagaattagaggttcgcatggatctgaaagccaaaatgccagatgaccatgcacgaaaaattttgctttcccgtattaataactatactatcccagaagaagaaattgggtctttcttatttcatgctattaataagccaaatgctcctatctggctcatactcaatgaagctggactatactggagagcagtaggaaatagcacttttgctattgcctgtcttcagagggctttgaatttagctccacttcaataccaagatgttcctcttgtcaacttggccaaccttttgattcattacggccttcatcttgatgccactaagctgctacttcaagctttggccatcaatagctctgagcctctgacctttttgagcctgggaaatgcttaccttgctctgaagaatatcagtggggcacttgaggcctttagacaggccttgaaattaaccaccaaatgtccagagtgtgaaaacagcctgaagttgatccgctgtatgcagttttatccttttctgtacaacatcacttcttctgtttgcagtggtaattgtcatgagaaaaccctggacaacagccatgacaaacagaaatattttgacaactcacagtcactggatgctgctgaagaagagccctctgagagaggaacagaggaggaccctgtattctctgttgagaattcagggagggactcagatgcccttagacttgaaagtacggtggttgaggagagcaatggttctgatgagatggagaattcagatgaaaccaaaatgtcagaagaaatactggctttggtggatgaatttcaacaggcatggcctttggaaggctttgggggtgcactagagatgaaagggcggcgtctagacttacaaggaatacgggtgctgaagaaaggtccccaggatggagtggccagaagctcttgctatggagactgcagaagtgaagatgatgaagcaacagaatggattacattccaggtcaaacgtgtaaagaaacccaaaggagatcataagaaaactcctgggaaaaaagtagaaacaggtcagatagaaaatggacatcgttaccaagcaaacctagagatcactggccccaaggtggcatctcctgggccacaaggaaaaaaacgtgactaccagcgtctgggatggcccagcccggacgaatgcctcaaactccgctgggtagagctgactgccatcgtgagtacctggcttgcagtttcttcaaaaaacattgacatcacagaacacatagattttgccacccctatacagcagccagcaatggagcctctttgcaatggcaatctccccacgagtatgcataccctggaccacttgcatggggtttccaaccgagccagcctgcactacacaggggagagtcagttaacagaggtattacaaaatctcggcaaagaccaatatccacaacagtcgcttgaacagattggcacccgaattgccaaagttttggaaaagaaccagacgtcctggtcctctccagcatggcagccctctactggagggtgaaaggccaaggaaagaaggcaatcgactgcctccgccaggctctgcactatgcgccacaccagatgaaggatgtgcccctgattagcctggccaacatcttgcacaatgccaagctctggaatgacgccgtcatagtagccaccatggcagtagagatcgcaccacactttgctgtgaaccacttcactctgggcaatgtctacgtggcaatggaagaatttgaaaaagcactggtgtggtatgaatccacattgaagcttcagcccgagtttgtcccagccaagaaccgaatccagaccatccagtgtcacttaatgctgaagaagggacggcgctctccttagtgcacttcttccttctctctttctctttactcatgctctaaaaaaaaagaataagaaaagaaaccaatcattgtcagtatctactattaatgatgtgtgtgaaaataactaagacttataacaggacttttacatatgtgggaattggtttgtttttgtttnnacgtttctcctttcccccaaccaacctcagaagaggcaccttcagaaacacacatttcttaaaaggaaagtgcagcttcaagatattgtgtaaatactgagccaagacatttctggagctgtgctctgtctccaaaaacctcaatgcctttagggcttttctcagtggtccagctagccttctctttggaggaggatgaagccgcattgcacattctctgcttcctgtcgtagcctctgttgtcaatggaaatgcggaagcccatctggtgcccgtcagtgagaagcaacgttctgcgctctctccgttagacctccatgctgtccccagtcttgtccattccatgctgctgtgttacaaactctcagaggtagtttgcaggggaggaaggggaatatgattttaaaaacaaaatatttacaacaacaaaaattcttaggatcacctgacctttgtaatgttatttatgttggggagggaggggggctgagaaggggaaatcagcagtgtgcaacatctttataatttgtactttaattacaaatcacaaggaaaccaataagttgaaatcctatataacaggtttatatatatagaatatgtatatttgaagccctctacagactgagtctatgttttactaattctttgttcactgtgttacccatcttggaataagttgtgaatgtcagctccctctctctgaggcctccagacttagctcctcaggagggtaatgagccaaggttgagtgtttccatacaatgcttttacctttgatcccaggagaatcagaaactccaacattttggaatcttcaagggcacatactgagaaaaaaaataaaattgtttatgagc

SEQ ID NO: 214 - DNA, 593 bp, Homo sapiens
agttgtgagtttccaagccccagctcactctgaccacttctctgcctgcccagcatcatgaaggggcttgcagctgccctccttgtcctcgtctgcaccatggccctctgctcctgtgcacaagttggtaccaacaaagagctctgctgcctcgtctatacctcctggcagattccacaaaagttcatagttgactattctgaaaccagcccccagtgccccaagccaggtgtcatcctcctaaccaagagaggccggcagatctgtgctgaccccaataagaagtgggtccagaaatacatcagcgaactgaagctgaatgcctgaggggcctggaagctgcgagggcccagtgaacttggtgggcaggaggaacaggagcctgagccagggcaatggccgtccaccctggaggccacctcttctaagagtcccatctgctatgcccagccacattaactaactttaatcttagtttatgcatcatatttcattttgaaattgatttctattgttgagctgcattatgaaattagtattttctctgacatctcatgacattgtctttatcatcctttcccctttcccttcaa

SEQ ID NO: 215 - DNA, 1847 bp, Homo sapiens
tctccgtcagccgcattgcccgctcggcgtccggcccccgacccgtgctcgtccgcccgcccgcccgcccgcccgcgccatgaacgccaaggtcgtggtcgtgctggtcctcgtgctgaccgcgctctgcctcagcgacgggaagcccgtcagcctgagctacagatgcccatgccgattcttcgaaagccatgttgccagagccaacgtcaagcatctcaaaattctcaacactccaaactgtgcccttcagattgtagcccggctgaagaacaacaacagacaagtgtgcattgacccgaagctaaagtggattcaggagtacctggagaaagctttaaacaagtaagcacaacagccaaaaaggactttccgctagacccactcgaggaaaactaaaaccttgtgagagatgaaagggcaaagacgtgggggagggggccttaaccatgaggaccaggtgtgtgtgtggggtgggcacattgatctgggatcgggcctgaggtttgcagcatttagaccctgcatttatagcatacggtatgatattgcagcttatattcatccatgccctgtacctgtgcacgttggaacttttattactggggtttttctaagaaagaaattgtattatcaacagcattttcaagcagttagttccttcatgatcatcacaatcatcatcattctcattctcattttttaaatcaacgagtacttcaagatctgaatttggcttgtttggagcatctcctctgctcccctggggagtctgggcacagtcaggtggtggcttaacagggagctggaaaaagtgtcctttcttcagacactgaggctcccgcagcagcgcccctcccaagaggaaggcctctgtggcactcagataccgactggggctggggcgccgccactgccttcacctcctctttcaaacctcagtgattggctctgtgggctccatgtagaagccactattactgggactgtctcagagacccctctcccagctattcctactctctccccgactccgagagcatgcttaatcttgcttctgcttctcatttctgtagcctgatcagcgccgcaccagccgggaagagggtgattgctggggctcgtgccctgcatccctctcctcccagggcctgccccacagctcgggccctctgtgagatccgtctttggcctcctccagaatggagctggccctctcctggggatgtgtaatggtccccctgcttacccgcaaaagacaagtctttacagaatcaaatgcaattttaaatctgagagctcgcttgagtgactgggtttgtgattgcctctgaagcctatgtatgccatggaggcactaacaaactctgaggtttccgaaatcagaagcgaaaaaatcagtgaataaaccatcatcttgccactaccccctcctgaagccacagcaggggttcaggttccaatcagaactgttggcaaggtgacatttccatgcatagatgcgatccacagaaggtcctggtggtatttgtaactttttgcaaggcatttttttatatatatttttgtgcacatttttttttacgattctttagaaaacaaatgtatttcaaaatatatttatagtcgaacaagtcatatatatgaatgagagccatatgaatgtcagtagtttatacttctctattatctcaaactactggcaatttgtaaagaaatatatatgatatataaatgtgattgcagcttttcaatgttagccacagtgtattttttcacttgtactaaaattgtatcaaatgtgacattatatgcactagcaataaaatgctaattgtttcatggta

SEQ ID NO: 216 - DNA, 1070 bp, Homo sapiens
ccgcgatacagttaggatggctgtagtacctctgctgttgttggggggtttgtggagcgctgtgggagcgtccagcctgggtgtcgttacttgcggctccgtggtgaagctactcaatacgcgccacaacgtccgactgcactcacacgacgtgcgctatgggtcaagtagtgggcagcagtcagtgacaggtgtaacctctgtggatgacagcaacagttactggaggatacggcggaagagtgccacagtgtgtgagaggggaacccccatcaagtgtggccagcccatccggctgacacatgtcaacactggccgaaacctccatagtcaccacttcacttcacctctttctggaaaccaggaagtgactgcttttggtgaagaaggtgaaggtgattatctggatgactggacagtgctctgtaatggaccctactgggtgagagatggtgaggtgcggttcaaacactcttccactgaggtactgctgtctgtcacaggagaacaatatggtcgacctatcagtgggcaaaaagaggtgcatggcatggcccagccaagtcagaacaactactggaaagccatggaaggcatcttcatgaagcccagtgagttgttgaaggcagaagcccaccatgcagagctgtgaatctagaggctctgagccactgttaacgcacaatgttcacagacatctgttgctgcctcaccttgggatccctgccacaagttccttgggcagtggccatgtcaccattgagatgaagatatacaacagaaaatagtggctgtgtttggaagcttcagccctgcacatttgaactagtcactctcccagacttgcgtgggtcagttctttctgagtagaggacttgctggtaaaggggcagatgctttttattagtactgataaaacaaactgagggaaacatccctcttagctgggaaacttttactcttcaggagcttggcatcatggactgttaatgtatgtgattttccccctattttctctcccccaaatgataaaaacaataattttattatgaaaacccaaaaacccaaaa

SEQ ID NO: 217 - DNA, 1897 bp, Homo sapiens
cctgatccgggcccgttggcggcgtcactgacgcttcgctccggtcctcggatcccgagcgcggggaggcagaccgactgtgagctgcttgtccccatcctgcggacgtcctggggacacagagccctccgtggtgcccggggattggattggagccaggacctcacttcctcctctgcccctgcccctgcccctcccagcacctggcccacaccctgcagcccgccccatggtctggccctgggtggcgatggcgtccaggtggggtcccctcattggcctggctccgtgctgcctctggctcctgggggcagtccttctgatggacgcgtctgcacggcctgccaaccactcgtccactcgagagagagtagccaacagggaggagaatgagatcctgcccccagaccacctgaacggggtgaagctggagatggacgggcacctcaatcgcggcttccaccaggaggtcttcctaggcaaggacctgggtggctttgatgaggacgcggagccgcggcggagccggaggaagctgatggtcatcttttccaaggtggatgtgaacactgaccggaagatcagtgccaaggagatgcagcgctggatcatggagaagacggccgagcacttccaggaggccatggaggagagcaagacacacttccgcgccgtggaccctgacggggacggtcacgtgtcttgggacgagtataaggtgaagtttttggcgagtaaaggccatagcgagaaggaggttgccgacgccatcaggctcaacgaggaactcaaagtggatgaggaaacacaggaagtcctggagaacctgaaggaccgctggtaccaggcggacagcccccctgcagacctgctgctgacggaggaggagttcctgtcgttcctccaccccgagcacagccggggaatgctcaggttcatggtgaaggagatcgtccgggacctggaccaggacggtgacaagcagctctctgtgcccgagttcatctccctgcccgtggccaccgtggagaaccagcagggccaggacattgacgacaactgggtgaaagacagaaaaaaggagtttgaggagctcattgactccaaccacgacggcatcgtgaccgccgaggagctggagagctacatggaccccatgaacgagtacaacgcgctgaacgagcccaagcagatgatcgccgtcgccgacgagaaccagaaccaccacctggagcccgaggaggtgctcaagtacagcgagttcttcacgggcagcaagctggtggactacgcgcgcagcgtgcacgaggagttttgagcgcccggccgcgccccgcgccgccccccacgcaccaccgggggggcctcgcgggtgactccggcctccgtggctgtcccggaccccacctcttctctgccgcccaccaccggccgaccgaccgcggcttccccagttgatgagcggcgtgtcccctctgcagcgcgcaccccggcggggctttggctgtgacgcggtcggggcgcggggctggtctgtggccccgcggcgcgcctcctccctggtccctcgaaatcgtggcatctcacttctgagaacgaaatctcgcttcagtcactctgccgaaggcgctgacggcatcgcggccggaacctctgggcccggcccctcccagggccgccgctccgtgggaaaaaacagctcctccatttccttggaaactgaacgattattaaaaatagataaacttcgctggaaatgagtagccaggaagttcaggggagggtccggggtccttcccggggcctggcgtgtcggaaccacccaggtcccgcagctgcctctgagaaaatccaaatattttttgtgacaagaatcacaaacatttactttaaatat

SEQ ID NO: 218 - DNA, 2099 bp, Homo sapiens
ggcgccggcgtcccctccgtgaggtcgcgcccgttcgcaccgcccccgcccgcaagaaagatggcagtggcctgatccgggcccgttggcggcgtcactgacgcttcgctccggtcctcggatcccgagcgcggggaggcagaccgactgtgagctgcttgtccccatcctgcggacgtcctggggacacagagccctccgtggtgcccggggattggattggagccaggacctcacttcctcctctgcccctgcccctgcccctcccagcacctggcccacaccctgcagcccgccccatggtctggccctgggtggcgatggcgtccaggtggggtcccctcattggcctggctccgtgctgcctctggctcctgggggcagtccttctgatggacgcgtctgcacggcctgccaaccactcgtccactcgagagagagtagccaacagggaggagaatgagatcctgcccccagaccacctgaacggggtgaagctggagatggacgggcacctcaatcgcggcttccaccaggaggtcttcctaggcaaggacctgggtggctttgatgaggacgcggagccgcggcggagccggaggaagctgatggtcatcttttccaaggtggatgtgaacactgaccggaagatcagtgccaaggagatgcagcgctggatcatggagaagacggccgagcacttccaggaggccatggaggagagcaagacacacttccgcgccgtggaccctgacggggacggtcacgtgtcttgggacgagtataaggtgaagtttttggcgagtaaaggccatagcgagaaggaggttgccgacgccatcaggctcaacgaggaactcaaagtggatgaggaaagctgcgcccctctcagcacaggaagtcctggagaacctgaaggaccgctggtaccaggcggacagcccccctgcagacctgctgctgacggaggaggagttcctgtcgttcctccaccccgagcacagccggggaatgctcaggttcatggtgaaggagatcgtccgggacctggaccaggacggtgacaagcagctctctgtgcccgagttcatctccctgcccgtgggcaccgtggagaaccagcagggccaggacattgacgacaactgggtgaaagacagaaaaaaggagtttgaggagctcattgactccaaccacgacggcatcgtgaccgccgaggagctggagaacgtgcccacactcccgctgcagccaataggcaccttaaatagccacttcgtgcggctggccgcggagctcggagggggaaaggcgacgctgacctgtgccccgctcgcccgcagagctacatggaccccatgaacgagtacaacgcgctgaacgaggccaagcagatgatcgccgtcgccgacgagaaccagaaccaccacctggagcccgaggaggtgctcaagtacagcgagttcttcacgggcagcaagctggtggactacgcgcgcagcgtgcacgaggagttttgagcgcccggccgcgccccgcgccgccccccacgcaccaccgggggggcctcgcgggtgactccggcctccgtggctgtcccggaccccacctcttctctgccgcccaccaccggccgaccgaccgcggcttccccagttgatgagcggcgtgtcccctctgcagcgcgcaccccggcggggctttggctgtgacgcggtcggggcgcggggctggtctgtggccccgcggcgcgcctcctccctggtccctcgaaatcgtggcatctcacttctgagaacgaaatctcgcttcagtcactctgccgaaggcgctgacggcatcgcggccggaacctctgggcccggcccctcccagggccgccgctccgtgggaaaaaacagctcctccatttccttggaaactgaacgattattaaaaatagataaacttcgctggaaatgagtagccaggaagttcaggggagggtccggggtccttcccggggcctggcgtgtcggaaccacccaggtcccgcagctgcctctgagaaaatccaaatattttttgtgacaagaatcacaaacatttactttaaatat

SEQ ID NO: 219 - DNA, 2666 bp, Homo sapiens
cctgatccgggcccgttggcggcgtcactgacgcttcgctccggtcctcggatcccgagcgcggggaggcagaccgactgtgagctgcttgtccccatcctgcggacgtcctggggacacagagccctccgtggtgcccggggattggattggagccaggacctcacttcctcctctgcccctgcccctgcccctcccagcacctggcccacaccctgcagcccgccccatggtctggccctgggtggcgatggcgtccaggtggggtcccctcattggcctggctccgtgctgcctctggctcctgggggcagtccttctgatggacgcgtctgcacggcctgccaaccactcgtccactcgagagagagtagccaacagggaggagaatgagatcctgcccccagaccacctgaacggggtgaagctggagatggacgggcacctcaatcgcggcttccaccaggaggtcttcctaggcaaggacctgggtggctttgatgaggacgcggagccgcggcggagccggaggaagctgatggtcatcttttccaaggtggatgtgaacactgaccggaagatcagtgccaaggagatgcagcgctggatcatggagaagacggccgagcacttccaggaggccatggaggagagcaagacacacttccgcgccgtggaccctgacggggacggtcacgtgtcttgggacgagtataaggtgaagtttttggcgagtaaaggccatagcgagaaggaggttgccgacgccatcaggctcaacgaggaactcaaagtggatgaggaaacacaggaagtcctggagaacctgaaggaccgctggtaccaggcggacagcccccctgcagacctgctgctgacggaggaggagttcctgtcgttcctccaccccgagcacagccggggaatgctcaggttcatggtgaaggagatcgtccgggacctggaccaggacggtgacaagcagctctctgtgcccgagttcatctccctgcccgtgggcaccgtggagaaccagcagggccaggacattgacgacaactgggtgaaagacagaaaaaaggagtttgaggagctcattgactccaaccacgacggcatcgtgaccgccgaggagctggaggtgagccctggcgcagccgtgtcccggagccggccctgcgaggtgctgtggcgggaggggctggtggatctgggcctgaggcaggaagctgtgctggtgtctggcctgagactccatctgggctggtcactggggcgtttgctcagcggtgtccaccaggctgcatggccgttgttggcgtttaggttcagacggatcagagacaggcgagcctggccgggctccatcctcagccccttgcggaggcgtcagggttctcacagcccctttttaacgggaccacaaggggaagctcatgctgggcccagcatggaggcaggtccaaggcccagcaggtgcaggtgggcggggcggcctgtgccacatggctggaatttaccaccttcctctgaagcgttttcactggtatcatgtgtaggcttgtttttctcccactgctgagtgagtcatcttgtttttatgtagaatcctgtgattcctggcgacagccagtgggcccggcccaggttagggatccttcagaactggggtccaggcctgtgtagcccctgtgccccgttacccctgctgcccccgggcaggccttccggggccaccggcttctccctgccctgtgttttaatttgtcccgcctcccttcgggaaccttccagaacgtgcccacactcccgctgcagccaataggcaccttaaatagccacttcgtgcggctggccgcggagctcggagggggaaaggcgacgctgacctgtgccccgctcgcccgcagagctacatggaccccatgaacgagtacaacgcgctgaacgaggccaagcagatgatcgccgtcgccgacgagaaccagaaccaccacctggagcccgaggaggtgctcaagtacagcgagttcttcacgggcagcaagctggtggactacgcgcgcagcgtgcacgaggagttttgagcgcccggccgcgccccgcgccgccccccacgcaccaccgggggggcctcgcgggtgactccggcctccgtggctgtcccggaccccacctcttctctgccgcccaccaccggccgaccgaccgcggcttccccagttgatgagcggcgtgtcccctctgcagcgcgcaccccggcggggctttggctgtgacgcggtcggggcgcggggctggtctgtggccccgcggcgcgcctcctccctggtccctcgaaatcgtggcatctcacttctgagaacgaaatctcgcttcagtcactctgccgaaggcgctgacggcatcgcggccggaacctctgggcccggcccctcccagggccgccgctccgtgggaaaaaacagctcctccatttccttggaaactgaacgattattaaaaatagataaacttcgctggaaatgagtagccaggaagttcaggggagggtccggggtccttcccggggcctggcgtgtcggaaccacccaggtcccgcagctgcctctgagaaaatccaaatattttttgtgacaagaatcacaaacatttactttaaatat

SEQ ID NO: 220 - DNA, 2028 bp, Homo sapiens
gaaggacggagccgagccgcggctgcctccctcgctcactccctcgcgcactcgcccgccccctccctccctcccctcccttccccgggcccgggtctggccccggcccattcgctgttgggtcttctgctagggaggatgtcgggttcgtcgctgcccagcgccctggccctctcgctgttgctggtctctggctccctcctcccagggccaggcgccgctcagaacgagccaaggattgtcaccagtgaagaggtcattattcgagacagccctgttctccctgtcaccctgcagtgtaacctcacctccagctctcacacccttacatacagctactggacaaagaatggggtggaactgagtgccactcgtaagaatgccagcaacatggagtacaggatcaataagccgagagctgaggattcaggcgaataccactgcgtatatcactttgtcagcgctcctaaagcaaacgccaccattgaagtgaaagccgctcctgacatcactggccataaacggagtgagaacaagaatgaagggcaggatgccactatgtattgcaagtcagttggctacccccacccagactggatatggcgcaagaaggagaacgggatgcccatggacattgtcaatacctctggccgcttcttcatcatcaacaaggaaaattacactgagttgaacattgtgaacctgcagatcacggaagaccctggcgagtatgaatgtaatgccaccaacgccattggctccgcctctgttgtcactgtcctcagggtgcggagccacctggccccactctggcctttcttgggaattctggctgaaattatcatccttgtggtgatcattgttgtgtatgagaagaggaagaggccagatgaggttcctgacgatgatgaaccagctggaccaatgaaaaccaactctaccaacaatcacaaagataaaaacttgcgccagagaaacacaaattaagtactgcttacaatatctttaggttcctgaaactggtggcaacatgacctgctaaaattttctgcttggacctctttggttctctcccctttcaagtgagcaacaccacaatgactgtctaaagcatgccttatttagcctctcctgtaagggtgatctagccaggtacattttaaacaatgcttcagtgtagaaggtgtaaactattttgggcttgatgtgctgtgaatgttgcttttttttttcctttgttaaaatatttaaatagaagtgaaaaggtcctctgaggatcagatcatgcatgcgccattttttacttaatgcagctgttaaattggcaaagctctaaaatgcactgctgccatctagtgatacacttttgtaaagtacagcaaaacctacaggtatatacagcatataaatatatatatatatatatttatatttttgggggtgggagaaatccaaaataaagtaaatgcttgtttcatttttaagctgctgatattcattccttattgtatgttgtcagatgaggaaattgtgcagttctggtacataaagatgagtaatataaactgaaatctataattttaagggcttaacctgtgactttaataagctggaacagtccactgaatgggtataatgaattgcagtatatacgtatgattgctttttaagtgattatcttttcttctgttaagtcatgtaaattcataaatccttttgcactgatgtgttgaaccttattcttgtacattcattcaatcaaggcaaacttttataatttttcttttgtttccaatgaccttgaaatgttatagcatggtaatattctatgcaactatagttatactttttggtttgacactgtattttttcacattgatttactggttgatgatagattttataacctaacggttctcatgcggtgcgtaattgtagatgcatgtacttgtgtgttttgtgtaactattgaagtgcaatgatgtataaaaaagtggattcacctgtttttaaaaataaaacattgat

SEQ ID NO: 221 - DNA, 685 bp, Homo sapiens
ggattggctggctctggaggcgcaggtggtccttcttctactgtcacatggtgcgcgctgttttctaatcacgtggctgccacccaggcctctctgctcctgtcttttgtttggatgccggcgctgctgcctgtggcctcccgccttttgttgctaccccgagtcttgctgaccatggcctctggaagccctccgacccagccctcgccggcctcggattccggctctggctacgttccgggctcggtctctgcagcctttgttacttgccccaacgagaaggtcgccaaggagatcgccagggccgtggtggagaagcgcctagcagcctgcgtcaacctcatccctcagattacatccatctatgagtggaaagggaagatcgaggaagacagtgaggtgctgatgatgattaaaacccaaagttccttggtcccagctttgacagattttgttcgttctgtgcacccttacgaagtggccgaggtaattgcattgcctgtggaacaggggaactttccgtacctgcagtgggtgcgccaggtcacagagtcagtttctgactctatcacagtcctgccatgatgagccctgttcctgctcatcatgaagatccccgcgatacttcaacgccttctgacttccaggtgatgactgggcccccaataaatcccgtctttgggtc

SEQ ID NO: 222 - DNA, 1109 bp, Homo sapiens
gagcctaggagccccccgcggctgcggcgcaggtgccctcggcctgagtcgggatggagctgcctgctgtgaacctgaaggtgattctcctaggtcactggctgctgacaacctggggctgcattgtattctcaggctcctatgcctgggccaacttcaccatcctggccttgggcgtgtgggctgtggctcagcgggactccatcgacgccataagcatgtttctgggtggcttgctggccaccatcttcctggacatcgtgcacatcagcatcttctacccgcgggtcagcctcacggacacgggccgctttggcgtgggcatggccatcctcagcttgctgctcaagccgctctcctgctgcttcgtctaccacatgtaccgggagcgcgggggtgagctcctggtccacactggtttccttgggtcttctcaggaccgtagtgcctaccagacgattgactcagcagaggcgcccgcagatccctttgcagtcccagagggcaggagtcaagatgcccgagggtactgaagccagccacgctgcgcccggccctgccccgggccttcctcgtgcctgggaggtcgttctagggatgctcctgacctccgtctcttggacctaagatggaatgtgtccccagctcagggattgcctgaaccaagaggccaggagcccccatgggccgcccagtaccatgcacactcctgtcccgaactccctgaggcctcccctcccttcagggcacccactggttcccaggctggaaccagggtctctctttacttcctaccccatggtggcaccacagaggccctcagccgagtcctgcctgagtgttgcaagctcaggcctttaaggactggtgatgccccctcaggcctcccccaagtttgctgggctttggtggaagccctgagagcttcaggtcctgctcagcccgaggagcagtctggcatgggagtgaggccccgtccttctcactgcctggtcacatggtgcctagggatgcagggctggaggccagaggtgtcagcaacactgtgacccaccacaacctccagcctcccttttcagagcacagcattaaagtttggggaattctgt

SEQ ID NO: 223 - DNA, 1629 bp, Homo sapiens
  misc_feature 1551,1568: n = a,c,g, or t
gtctggcttggtcttcccccgtaaggaaatggccggggagctccaggggacccaggcgccgtcgcttcggcggagcctgggctgaccagccaggacagcggggtaaacccgaacaattctgcgcgaggtagggaggcccatggcgtccggcagtaactggctctccggggtgaatgtcgtgctggtgatggcctacgggagcctggtgtttgtactgctatttatttttgtgaagaggcaaatcatgcgctttgcaatgaaatctcgaaggggacctcatgtccctgtgggacacaatgcccccaaggacttgaaagaggagattgatattcgactctccagggttcaggatatcaagtatgagccccagctccttgcagatgatgatgctagactactacaactggaaacccagggaaatcaaagttgctacaactatctgtataggatgaaagctctggatgccattcgtacctctgagatcccatttcattctgaaggccggcatccccgttccttaatgggcaagaatttccgctcctacctgctggatctgcgaaacactagtacgcctttcaagggtgtacgcaaagcactcattgatacccttttggatggctatgaaacagcccgctatgggacaggggtctttggccagaatgagtacctacgctatcaggaggccctgagtgagctggccactgcggttaaagcacgaattgggagctctcagcgacatcaccagtcagcagccaaagacctaactcagtcccctgaggtctccccaacaaccatccaggtgacatacctcccctccagtcagaagagtaaacgtgccaagcacttccttgaattgaagagctttaaggataactataacacattggagagtactctgtgacggagctgaaggactcttgccgtagattaagccagtcagttgcaatgtgcaagacaggctgcttgccgggccgccctcggaacatctggcccagcaggcccagactgtatccatccaagttcccgttgtatccagagttcttagagcttgtgtctaaagggtaattccccaacccttccttatgagcatttttagaacattggctaagactattttcccccagtagcgcttttttctggatttgcattcgggtgttattcttaatgtttctgtcaaagcttcttaaaaatcttcacttggtttcagccatagttcaccttccctgttccaggtttatttaattccaaaggtgagagttggagtgagatgtcttccatatctatacctttgtgcacagttgaatgggaactgtttgggtttagggcatcttagagttgattgatggaaaaagcagacaggactggtgggaggtcaagtggggaagttggtgaatgtggaataacttacctttgtgctccacttaaaccagatgtgttgcagctttcctgacatgcaaggatctactttaattccacactctcattaataaattgaataaaagggaatgttttggcacctgaaataatctgccaggctatgtgacagtaggngggaatggtttcccctnacaagcccaatgcactggtctgactttataaattatttaattaaatgaactattatcaaat

SEQ ID NO: 224 - DNA, 1074 bp, Homo sapiens
gtgaagtcgcggtgcagcggtgggcggcatgtctgtggccggtggggagattcgtggggacacggggggagaggacactgctgctcccggccggttcagcttcagcccggagcccacgctcgaggacatccgccgcctccatgctgagtttgctgcggaacgagactgggaacagttccatcagcctcggaatctcctcctggccttggttggggaagtgggggagctggcagaactctttcagtggaaaaccgatggggaacctggcccccaaggctggtcccccagggaacgggcagcccttcaagaggagcttagtgacgtcctcatctacctggtggcattagcagcccgctgccgtgtggatctgccgctagcagtgctctccaaaatggacatcaaccggcgacgctacccagcccatctggcccgcagctcttcccgcaagtatacagaattgccccatggggccatctctgaagaccaggctgtggggcctgcggacattccctgtgactccacaggccagacctcaacctagaaagatggccacaggacttgcaactcagggtggtgtctgaagagcagagagtggcctggccctggagcctttttctagtcttttcagaatagatcatgggcctgaggcctccacttcttgaggtctgaggcccagcagcctctagaaggtagcctcctggtgtttgttctcccagtaaaatggttttgggcgataacttctagattattcctggatggccagggaggctctctgtctcagcaggtgatgacgggggtaccaggggtgcctctgagacccattctcgtgtttccctgttgtaccttttgcctgcagggcagagagatctggtttctagcaaattcccagtaggatgtcatgtaagttccttccccctcttagagattgaaggctgtaagagtccagatggtggagccaggctgtctgggttcaaatgccatctttgacacttgcaagctaaatgacattactcaaattaatcgttctgcacttcagcttccttgtctatcaaataaaaagaatagtacctgccc

SEQ ID NO: 225 - DNA, 2139 bp, Homo sapiens
gggctacgtgaagagaggcgcggcgtgactgagctacggttctggctgcgtcctagaggcatccggggcagtaaaaccgctgcgatcgcggaggcggcggccaggccgagaggcaggccgggcaggggtgtcggacgcagggcgctgggccgggtttcggcttcggccacagctttttttctcaaggtgcaatgaaagccttccacactttctgtgttgtccttctggtgtttgggagtgtctctgaagccaagtttgatgattttgaggatgaggaggacatagtagagtatgatgataatgacttcgctgaatttgaggatgtcatggaagactctgttactgaatctcctcaacgggtcataatcactgaagatgatgaagatgagaccactgtggagttggaagggcaggatgaaaaccaagaaggagattttgaagatgcagatacccaggagggagatactgagagtgaaccatatgatgatgaagaatttgaaggttatgaagacaaaccagatacttcttctagcaaaaataaagacccaataacgattgttgatgttcctgcacacctccagaacagctgggagagttattatctagaaattttgatggtgactggtctgcttgcttatatcatgaattacatcattgggaagaataaaaacagtcgccttgcacaggcctggtttaacactcatagggagcttttggagagcaactttactttagtgggggatgatggaactaacaaagaagccacaagcacaggaaagttgaaccaggagaatgagcacatctataacctgtggtgttctggtcgagtgtgctgtgagggcatgcttatccagctgaggttcctcaagagacaagacttactgaatgtcctggcccggatgatgaggccagtgagtgatcaagtgcaaataaaagtaaccatgaatgatgaagacatggatacctacgtatttgctgttggcacacggaaagccttggtgcgactacagaaagagatgcaggatttgagtgagttttgtagtgataaacctaagtctggagcaaagtatggactgccggactctttggccatcctgtcagagatgggagaagtcacagacggaatgatggatacaaagatggttcactttcttacacactatgctgacaagattgaatctgttcatttttcagaccagttctctggtccaaaaattatgcaagaggaaggtcagcctttaaagctacctgacactaagaggacactgttgtttacatttaatgtgcctggctcaggtaacacttacccaaaggatatggaggcactgctacccctgatgaacatggtgatttattctattgataaagccaaaaagttccgactcaacagagaaggcaaacaaaaagcagataagaaccgtgcccgagtagaagagaacttcttgaaactgacacatgtgcaaagacaggaagcagcacagtctcggcgggaggagacaaaaagagcagagaaggagcgaatcatgaatgaggaagatcctgagaaacagcgcaggctggaggaggctgcattgaggcgtgagcaaaagaagttggaaaagaagcaaatgaaaatgaaacaaatcaaagtgaaagccatgtaaagccatcccagagatttgagttctgatgccacctgtaagctctgaattcacaggaaacatgaaaaacgccagtccatttctcaaccttaaatttcagacagtcttgggcaactgagaaatccttatttcatcatctactctgtttggggtttggggttttacagagattgaagatacctggaaagggctctgtttcaagaatttttttttccagataatcaaattattttgattattttataaaaggaatgatctatgaaatctgtgtaggttttaaatattttaaaaattataatacaaatcatcagtgcttttagtacttcagtgtttaaagaaataccgtggaaatttataggtagataaccagattgttgctttttgtttaaaccaagcaggtgaaatggctataaagactgactctaaaccaagattctgcacataatgattggaattgcacaataaacattgcttgatggtgttcttgtatgtctacatt

SEQ ID NO: 226 - DNA, 983 bp, Homo sapiens
gcctgcccgccacatacccagctgacatgggcaccgcaggagccatgcagctgtgctgggtgatcctgggcttcctcctgttccgaggccacaactcccagcccacaatgacccagacctctagctctcagggaggccttggcggtctaagtctgaccacagagccagtttcttccaacccaggatacatcccttcctcagaggctaacaggccaagccatctgtccagcactggtaccccaggcgcaggtgtccccagcagtggaagagacggaggcacaagcagagacacatttcaaactgttccccccaattcaaccaccatgagcctgagcatgagggaagatgcgaccatcctgcccagccccacgtcagagactgtgctcactgtggctgcatttggtgttatcagcttcattgtcatcctggtggttgtggtgatcatcctagttggtgtggtcagcctgaggttcaagtgtcggaagagcaaggagtctgaagatccccagaaacctgggagttcagggctgtctgaaagctgctccacagccaatggagagaaagacagcatcacccttatctccatgaagaacatcaacatgaataatggcaaacaaagtctctcagcagagaaggttctttaaaagcaactttgggtccccatgagtccaaggatgatgcagctgccctgtgactacaaggaggaagagatggaattagtagaggcaatgaaccacatgtaaattattttattgtttcatgtctgcttctagatctaaaggacactagcattgccccagatctgggagcaagctaccaacaggggagactctttcctgtatggacagctgctgtggaaatactgcctgcttctcccacctcctcagagccacaggaaagaggaggtgacagagagagagcaaggaaagtgatgaggtggattgatactttctactttgcattaaaattattttctagcctgc

SEQ ID NO: 227 - DNA, 2438 bp, Homo sapiens
ataaaaaccatacatcctttttattgttaagtcataaagaggtatcaaaattaaaagcaaaaattacagggtaagacttaacaaaactactaggagcgtcaaaggaagtgaaaatgggactaggcgcggggcaatatgaattaatgaacatgggaaggacaaggatggggagaacagtgagcatgtgctgaagatactaggggagaggatctggtgaaaaatttgatcttagacaagcgcctaggtaaagaaataatgggataagatttctaaaccccactatgtgcttaagagtcatcctcgccattggcgctgtctctgtcatcctctccttcctcagcctctttttcatcatccttgatcaactccagctggtcatccccccgatcttcattatcatcatcatccagtaggtccccctcctcagcagagtcatctgcacccccctcagactccatcttcacattagtctcatctttcttcacggagctgctgctctgctcctcttctgacttatcattcttcatctctactgcttgtttgctctgttccttttcaattttttccaggttttccaggagagaatccactttttgttttatctgggtcagctccttcttaatggcctgaaggtcatctcctttcaacttcccagacttggaagatccccgctgtccactcttagaattgaagccacttttgccccttcgtgaagtgtttcctgatacacgctgacgtttcgagggcactacagcccgagcaataggaggaggaggaggtacacgtgctgggtaactgtacatcctatcataatagtcccgttgaaagtcatagtccaagtcaaaagaggagccgtacatctccgctgcagatcgtttcacacctgcttttcctcggttcacttttggctctgcagccaggttaatatctaaaacctggccagcaatcattctgccatcctctcctgctacagcagcccgggcatttctctcattaacatactgaacgaaggcaaagcccttatgaacagagcagcccacaattttgccatacttcgaaaagattgcctccacatcagatttcttgaccacaagagtgttgagattcccaatgaatacacgggagttcatggagcgaggatctgtcttgttggtaacgttgctggccatcgtgtttgatggtaaggtttctcacaaagccgaaaatgtagctgaagatcaaaaaaatctcacaagaaggggagggagaagagattcgattctgagtctcctactcccgggttctgcgtagagaagccgactgctgctggaggtcggcaacgcggccacaaccgctcagtcttcgtcgagagcactcccaggtaggcaattgccccagtggaatgcctcatcagagcagtgcacagcaggcccctgtggaggatcaatgcagtggctgaacaccatgaaggaactggcacttggagtccggacatctaaaacttgcaccttttctgctgccatgacaaccatgcaaggaatggaacaggccatgccaggggctggccctggtgtgccccagctgggaaacatggctgtcatacattcacatctgtggaaaggattgcaagagaagttcttgaagggagaacccaaagtccttggggttgtgcagattctgactgccctgatgagccttagcatgggaataacaatgatgtgtatggcatctaatacttatggaagtaaccctatttccgtgtatatcgggtacacaatttgggggtcagtaatgtttattatttcaggatccttgtcaattgcagcaggaattagaactacaaaaggcctggtccgaggtagtctaggaatgaatatcaccagctctgtactggctgcatcagggatcttaatcaacacatttagcttggcgttttattcattccatcacccttactgtaactactatggcaactcaaataattgtcatgggactatgtccatcttaatgggtctggatggcatggtgctcctcttaagtgtgctggaattctgcattgctgtgtccctctctgcctttggatgtaaagtgctctgttgtacccctggtggggttgtgttaattctgccatcacattctcacatggcagaaacagcatctcccacaccacttaatgaggtttgaggccaccaaaagatcaacagacaaatgctccagaaatctatgctgactgtgacacaagagcctcacatgagaaattaccagtatccaacttcgatactgatagacttgttgatattattattatatgtaatccaattatgaactgtgtgtgtatagagagataataaattcaaaattatgttctcatttttttccctggaactcaataactcatttcactggctctttatcgagagtactagaagttaaattaataaataatgcatttaatgagg

SEQ ID NO: 228 - DNA, 1510 bp, Homo sapiens
atcagagggtaaataccccttgtataggaaaacagacataatttcctcttgggagttctctttatgacttagcattttcttctacttgagaaaattcctgtttttccgattatttcatcttgaactttcttttttttaagcttttgtgcaatgtaatagtttgttgatccatctttgtacattttcattttatttcatgtctttctctcacctacctgtcagaatcagctatagcagattttgaattctttagttaaaaaatagttgctttacttgtttcctcatgagtttgttaaatagctttgcattttagtcctctattatgctatgaaaattattacgaagtttatattgttccctttttaagcctgccttactcttgtcttttgtcattgtctatggtttaatgaagaacacaccaaactaacatttttgtttattttgaggaacaaaaaaacttttctcttttaagggaagttactacacattgagttagtaactactctttcagtcaaggttccttaatcagtccagtctacatcaggactatgacttggggggcggggctaatcctttttgctgttctgagctactattgtcaactgctgttgtacatactgttatgtgtaatggcgtaaatatatttattatgtttgtaaaattcattgcagatcaaggttgctcttctgtgatatatgggatattatgttttaaagaccatcttggaatacaattagagaacttagtattttgatgtactaagacctattttaagtttaatattctactttgcaaaaactttaattaaagatgttatttaaaaaaaaatgttgcttgctttgcttactagtatatggcattgttatagataattgaataaaatacaatttagaaaggaaaatgctttacattgttaatgagaattccatttaacaacaacaaaaagatgctaaattctgtaccttaaagataagtagattgagatgtcaatttgaattagtaaactgtgttacaaatgattaatactagcttttaaaaagttgtattttccaggcacacaggaatttaggttgggcgaattcacactaacaaattataactaaaaattggtataattaacattgtttttcaaaataaagattactccttgtgaaatattaataattaacatattgtattaaataagtatttctactccaaagtatagattacttaggataaaaacattgttatttctctgtttagtcaaaccacttcctcttagttcagaggttataaataattgcatattaggagaattggattactgaggtttgtattgcgtattgaatatattttgtgttattttagaagataataattagcaggtattttaattttatagttaattcagctgaatcattaagaagctcgcctttttgtatttttttatcctgttaacagactatctagaaaacatgcaaattttaactattaacataatcataataaagatatcttatttattgcc

SEQ ID NO: 229 - DNA, 1186 bp, Homo sapiens
  misc_feature 792,1136: n = a,c,g, or t
gtgaagcaaatgacactgcaaatgaatatgaaattgagaagtgagaaaatacatctagaatctcagagttacttggtatatttgaatctgaaaagacttattcgaggaatgtactagcaatggctctgaagaaacagactgacagagcagctgctggcagtcctgtgcagcctgctccaaaaccaagcctcagcagaggccttatggtaaaggggggaagttcaatcatctctcctgatacaaatctcttaaacattaaaggaagccattcaaagagcaaaaatttacactttttcttttctaacaccgtgaaaatcactgcattttccaagaaaaatgagaacattttcaattgtgatttaatagattctgtagatcaaattaaaaatatgccatgcttggatttaagggaatttggaaaggatgttaaaccttggcatgttgaaacaacagaagctgcccgcaataatgaaaacacaggttttgatgctctgagccatgaatgtacagctaagcctttgtttcccagagtggaggtgcagtcagaacaactcacggtggaagagcagattaaaagaaacaggtgctacagtgacactgagtaaaatatctatggccactgacagtccacacttaggcactgagagatattgatgttctgaaataagattttatgaatttggatacccttttgaggaacttgatgtaaacatggtgttcagaaatctcgtgtctatctcaatgggatatttcttgtattacaccttgtcatttttttcacaatttatttanatctacttttgtttgaactggaatgaagagatgaaacactatggatatgttttccattcaaatggcactttacatattgttctgttttcctgtaaaacatcatgggtgtgatttttatactgctgctgcttgtcacaattattataacttctctgtaatttcctctgaaataaaattgaatcacctgaggtgcaaaccaaaatacttctgtaactttttttgatatatactgtcattctaagtacatatactccttgtgacttgggaagtatttgtcttgaggcaagtatttaccacccacactaaaataatgctggaaaaaataaaatactaaactgaaggcncagtaaaaaaaaaaaaaaaaaaaaaaaaaaaaaaaaaaaaaaaaaaaatt

SEQ ID NO: 230 - DNA, 1057 bp, Homo sapiens
aagaggcctacaagtagcgccaatctaggcagcggctgtgaggaaaaaaggcatgaggggtcgtcttcggaatctgtgccacccggcactaccatttcgagggtgaagctcctcgacaccatggtggacacttttcttcagaagctggtcgccgccggcagctaccagagattcactgactgctataagtgcttctaccagttgcagcctgcgatgacacagcaaatctatgacaagtttatagctcagttgcagacatctatccgggaggaaatctctgacatcaaagaggaggggaacctagaagctgtcttgaatgccttggataaaattgtggaagaaggcaaagtccgcaaagagccagcctggcgccccagcgggatcccagagaaggatctgcacagtgttatagcaccctacttcctgcagcaacgggacaccctgcggcgccatgtgcagaaacaggaggccgagaaccagcagctggcagatgccgtcctggcagggcggaggcaggtggaggagctgcagctacaggtccaggcccagcagcaggcctggcaggctctacacagagaacagagggagctggttgctgtgctgagggagcctgagtgaggagaccgccagccccagaagcagagggcagtcaaggtcaagagcctgtggtccagcatgcctggcctgggcgggctacctctgagaacggctgaaatggtgcccagtccatcagcagtgatggaatttgctggaggactaggccagagcaagcctcactgccactgtgcctttggggcacccttggggttggacatacaccccctttagattcctctgtttcttctacctggataattcttggccatgttctctcttctctaggttcaggtcagctctgcccctccgcccccctcctgctggttccccagcccttttccctggccctggcttggagaatctgttttcaatctccactgattgcccccttgctggccagcccaggggcctttaccatgttctctccacatccgtaaataaacttccttcactacactgt

SEQ ID NO: 231 - DNA, 1900 bp, Homo sapiens
caaagaggcctaggttcaacttcaacatggccgaagcaagtagcgccaatctaggcagcggctgtgaggaaaaaaggcatgaggggtcgtcttcggaatctgtgccacccggcactaccatttcgagggtgaagctcctcgacaccatggtggacacttttcttcagaagctggtcgccgccggcagctaccagagattcactgactgctataagtgcttctaccagttgcagcctgcgatgacacagcgaatctatgacaagtttatagctcagttgcagacatctatccgggaggaaatctctgacatcaaagaggaggggaacctagaagctgtcttgaatgccttggataaaattgtggaagaaggcaaagtccgcaaagagccagcctggcgccccagcgggatcccagagaaggatctgcacagtgttatagcaccctacttcctgcagcaacgggacaccctgcggcgccatgtgcagaaacaggaggccgagaaccagcagctggcagatgccgtcctggcagggcggaggcaggtggaggagctgcagctacaggtccaggcccagcagcaggcctggcaggctctacacagagaacagagggagctggttgctgtgctgagggagcctgagtgaggagaccgccagccccagaagcagagggcagtcaaggtcaagagcctgtggtccagcatgcctggcctgggcgggctacctctgagaacggctgaaatggtgcccagtccatcagcagtgatggaatttgctggaggactaggccagagcaagcctcactgccactgtgcctttggggcacccttggggttggacatacaccccctttagattcctctgtttcttctacctggataattcttggccatgttctctcttctctaggttcaggtcagctctgcccctccgcccccctcctgctggttccccagcccttttccctggccctggcttggagaatctgttttcaatctccactgattgcccccttgctggccagcccaggggcctttaccatgttctctccacatccgtaaataaacttccttcactacactgtaaaaaaaaaaaaaaagcggccgcaggtctagaattcaatcgggacgggaggccaggctcgtgccgttttgcagacgccaccgccgaggaaaaccgtgtactattagccatggtcaaccccaccgtgttcttcgacattgccgtcgacggcgagcccttgggccgcgtctcctttgagctgtttgcagacaaggtcccaaagacagcagaaaattttcgtgctctgagcactggagagaaaggatttggttataagggttcctgctttcacagaattattccagggtttatgtgtcagggtggtgacttcacacgccataatggcactggtggcaagtccatctatggggagaaatttgaagatgagaacttcatcctaaagcatacgggtcctggcatcttgtccatggcaaatgctggacccaacacaaatggttcccagtttttcatctgcactgccaagactgagtggttggatggcaagcatgtggtgtttggcaaagtgaaagaaggcatgaatattgtggaggccatggagcgctttgggtccaggaatggcaagaccagcaagaagatcaccattgctgactgtggacaactcgaataagtttgacttgtgttttatcttaaccaccagatcattccttctgtagctcaggagagcacccctccaccccatttgctcgcagtatcctagaatctttgtgctctcgctgcagttccctttgggttccatgttttccttgttccctcccatgcctagctggattgcagagttaagtttatgattatgaaataaaaactaaataacaattgtc

SEQ ID NO: 232 - DNA, 943 bp, Homo sapiens
agcaagtagcgccaatctaggcagcggctgtgaggaaaaaaggcatgaggggtcgtcttcggaatctgtgccacccggcactaccatttcgagggtgaagctcctcgacaccatggtggacacttttcttcagaagctggtcgccgccggcaggaggaaatctctgacatcaaagaggaggggaacctagaagctgtcttgaatgccttggataaaattgtggaagaaggcaaagtccgcaaagagccagcctggcgccccagcgggatcccagagaaggatctgcacagtgttatggcaccctacttcctgcagcaacgggacaccctgcggcgccatgtgcagaaacaggaggccgagaaccagcagctggcagatgccgtcctggcagggcggaggcaggtggaggagctgcagctacaggtccaggcccagcagcaggcctggcaggctctacacagagaacagagggagctggttgctgtgctgagggagcctgagtgaggagaccgccagccccagaagcagagggcagtcaaggtcaagagcctgtggtccagcatgcctggcctgggcgggctacctctgagaacggctgaaatggtgcccagtccatcagcagtgatggaatttgctggaggactaggccagagcaagcctcactgccactgtgcctttggggcacccttggggttggacatacaccccctttagattcctctgtttcttctacctggataattcttggccatgttctctcttctctaggttcaggtcagctctgcccctccgcccccctcctgctggttccccagcccttttccctggccctggcttggagaatctgttttcaatctccactgattgcccccttgctggccagcccaggggcctttaccatgttctctccacatccgtaaataaacttccttcactacactgt

SEQ ID NO: 233 - DNA, 1974 bp, Homo sapiens
ctttggcctgtcatcctgaaagcccactgctggcttgaagggaaggtaaacctggtaaacaaactaaatctaaatgttcttgtatgcccaaaagtttggagtgaccagcaagaggccaatagatgtgggggtggggaagaatattctcattcctgtggtatgttgcagttccggcatgttcagaacaacctgatgagaaattctacaacagaaaaaatcgaaccaagagaactggaccccatcctgactgaggtcaccctgatgaatgcccgcagtgagctatacttacgcttcctcaagaagaggattagctctgattttgaggtgggagactccatggcctcagaggaagtaaagcaagagcaccagaagtgtctggacaaactcctcaataactgccttttgagctgtaccatgcaggagctaattggcttatatgttaccatggaggagtacttcatgagggagactgtcaataaggctgtggctctggacacctatgagaagggccagctgacatccagcatggtggatgatgtcttctacattgttaagaagtgcattgggcgggctctgtccagctccagcattgactgtctctgtgccatgatcaacctcgccaccacagagctggagtctgacttcagggatgttctgtgtaataagctgcggatgggctttcctgccaccaccttccaggacatccagcgcggggtgaccagtgccgtgaacatcatgcgcagcagcctccagcaaggcaaatttgacacaaatggcatcgagagtactgacgaggcgaagatgtccttcctggtgactctgaacaacgtggaagtctgcagtgaaaacatctccactctgaagaagacactggagagtgactgcaccaagctcttcagccagggcattggaggggagcaggcccaggccaagtttgacagctgcctttctgacttggccgccgtgtccaacaaattccgagacctcttgcaggaagggctgacggagctcaacagcacagccatcaagccacaggtgcagccttggatcaacagctttttctccgtctcccacaacatcgaggaggaagaattcaatgactatgaggccaacgacccttgggtacaacagttcatccttaacctggagcagcaaatggcagagttcaaggccagcctgtccccggtcatctacgacagcctaaccggcctcatgactagccttgttgccgtcgagttggagaaagtggtgctgaaatccacctttaaccggctgggtggtctgcagtttgacaaggagctgaggtcactcattgcctaccttaccacggtgaccacctggaccatccgagacaagtttgcccggctctcccagatggccaccatcctcaatctggagcgggtgaccgagatcctcgattactggggacccaattccggcccattgacgtggcgcctcacccctgctgaagtgcgccaggtgctggccctgcggatagacttccgcagtgaagatatcaagaggctgcgcctgtagctgcctggatgagcacacctggctcatcacacttgcaggcctgttccctaaggggccccagccaaggagctgagcgaggctgtcgggcttgggggagatctgacagcccagacctttctacggctggcagcagagaaacaaagtctggacccactccatgctctgccctcagacctggccaggtgatgctctgggggcagcatctccccaccgagagaagcgggctcctaatgaggtgggaaagccacggcaggcagcgagcagcccaggccagctttctgcatggatggtcagtctcttgccctcaaacactacagcaaacaagctacccctgccagtcctagacaacttgggtacatctggggacctagcagttaggcttgactttgaggagaggctgtgatgtttatgatccctgaataaagctactccttggag

SEQ ID NO: 234 - DNA, 731 bp, Homo sapiens
caagaaagacgtggtcctgacagacagacaatcctattccctaccaaaatgaagatgctgttgctgctgtgtttgggactgaccctagtctgtgtccatgcagaagaagctagttctacgggaaggaactttaatgtagaaaagattaatggggaatggcatactattatcctggcctctgacaaaagagaaaagatagaagataatggcaactttagactttttctggagcaaatccatgtcttggagaattccttagttcttaaattccatactgtaagagatgaagagtgctccgaattatctatggttgctgacaaaacagaaaaggctggtgaatattctgtgacgtatgatggattcaatacatttactatacctaagacagactatgataactttcttatggctcatctcattaacgaaaaggatggggaaaccttccagctgatggggctctatggccgagaaccagatttgagttcagacatcaaggaaaggtttgcacaactatgtgaggagcatggaatccttagagaaaatatcattgacctatccaatgccaatcgctgcctccaggcccgagaatgaagaatggcctgagcctccaggtgggcaatatccaaagagagcaaggagggggttggtcgtcatggagaggcccttcccaaagtattaatgttgtgcacccaaattacattaaaaaatagttcgataaagaatcttctagg

SEQ ID NO: 235 - DNA, 919 bp, Homo sapiens
agaaaaagagatatttttagattgtatgccacttttgtttaagaactgtgctgtgatcactgtattaattttggtttatcttggcatatatccttcagtttgtttttatttttaatttttcctttttttccgattaggctttggtcagcatttttcatttaaagaaaagtaacactcccatccactcataagcttggtacaaaaacttctctggcagttacttttgaagcttcactctgctttctgtataaagggcagtctgtggtcacgcaagactttttaaaaaaaaaaaaaaaaaaaaaaaaaaacttttccaggcagcttcatgatgtgcaggcagtagccagacagggtcatgggaagggggccctgtgcttctaaactgagtggttgctggttagtttggtattcaaaagaggataaaaatctggtagattagttcattctcagcatgtgtagctagacatgagtaaagataacagcatgagaaactgttagtacgcatacctcagttcaaacctttagggaatgattaaaatttaaaaaaaaaacatttcactcagttgcacttagtcgtatgtcttgcatgcttagtctaaagactgtagcaaaaaaaaaaaaaaagaaaaattagattttacatatctttgcaggtatcacagccttgcagaagaaccaactgaaaaaaaaattctcaggctttacagcaagcaaacttcactatgatttttacaattctgattctgtatcccctgggggttatcccagttgcttctttaggatggggtttattacgttgtacatatatcccgatgtgtctgtgtgaatctttgtcttttttgggggagggcagagggcggttctttttttagaaattgttcctaaaaaggaataaatgcatacacctgtttgtcaaaac

SEQ ID NO: 236 - DNA, 1348 bp, Homo sapiens
aaatgctatcctgactatctttctgtgatatctatattttttcccttcagaaattactaatatcatctgtaccatggtgtcagtatcccaataacttgactggaaggaaggacattcctcaaggcagaaattaaggtttgccttgatgtaccaaatgtaccaacgtagggctttgattcagaagagtgtgctgtgaggaggcaggtgccaggcggattttatcatgacctgggtgaaagccatctgccctgcagagggagctgtttcagaactcctaataggaaagtcaaacgtccagcacagccagtgcaagagtggtcccaccagcacagtcctggcaaaactcttgactgtgtagccttcaaatctgattctctggatctctgggtggtcccatgaactatataataacatttgatgaaactttttttctgttagctggtgtagattctgtgatgtgtaattgagaatcctaactgaacccacaattttgctcttgatctttttttttttttttttttgagacagagtcttgctctatcgtccaggccagagtgcagtggcctgatctcagctcactgcagcctccaccgcccaggcccaatagattctcctgcctcagcctcccgagcagctgcgaatacaggtgcgtgccaccatatccagctaattttgtgtatttttagtagagactgggtttcaccatgttggccgggctggtctcgaactcctgacctcaagcaatccacccatctcggcctcccaaggtgctgggattacaggcgtgagccaccgctcccagcctgctcttgatatttttgaccagggtatttggaactgactagcacccctcaccgtgaattggtgacctttccttcagttttcatgttcttgaggagacatgggaatatggctttctcccctacgctcacatctaccctcactaagcagctactgcataggccatgggtcggcaaatttttcctgtaaaggactaggtagtaaatatttcagattctgtagatcataacagtctccattgcaacccctcaaatatgacattatagcacaaaagcagccatagacaatatgtaaacaaatggcaaggctgtttccaaaaaaactttatttacagaaacaggtggtaggctggatttgccaacccttgacataggtagcactttggagattatagttggtaaaatagaacttttgagagtggacactgactacaggtctagccttggccttaatactggcagccttgtcactttggacaaatacatttacctctctatacctgtctttgcacgtaatacccataatgtcccgattgaattctagacct

SEQ ID NO: 237 - DNA, 2311 bp, Homo sapiens
cttgttttgggtgtactggatcatgacacttctttttcttggcactaccggcagtcctgttcagaatgagcaaggctttgtggagttcaaaatttctgggcctctgcagtacatgtggtggtaccatgtggtgggcctgatttggatcagtgaatttattctagcatgtcagcagatgacagtggcaggagctgtggtaacatactattttactagggataaaaggaatttgccatttacacctattttggcatcagtaaatcgccttattcgttaccacctaggtacggtggcaaaaggatctttcattatcacattagtcaaaattccgcgaatgatccttatgtatattcacagtcagctcaaaggaaaggaaaatgcttgtgcacgatgtgtgctgaaatcttgcatttgttgcctttggtgtcttgaaaagtgcctaaattatttaaatcagaatgcatacacagccacagctatcaacagcaccaacttctgcacctcagcaaaggatgcctttgtcattctggtggagaatgctttgcgagtggctaccatcaacacagtaggagattttatgttattccttggcaaggtgctgatagtctgcagcacaggtttagctgggattatgctgctcaactaccagcaggactacacagtatgggtgctgcctctgatcatcgtctgcctctttgctttcctagtcgctcattgcttcctgtctatttatgaaatggtagtggatgtattattcttgtgttttgccattgatacaaaatacaatgatgggagccctggcagagaattctatatggataaagtgctgatggagtttgtggaaaacagtaggaaagcaatgaaagaagctggtaagggaggcgtcgctgattccagagagctaaagccgatggcttcgggagcaagttctgcttgaacctagccgacggttatggaaacccattgacattccaaaacaatatatacacataactatgtatttgtgtgtgtgggtgtgtgtatatatgtatatgtatgtgtgtatatatgtatatgtatatacacacacacacataaatcagccaaaatcagagaaaaggaacagggatttaataccttttttatgcttatttttgtcaaacatgtactcctttcatacgggtggcttttacaaggcaacttccgtcatttaatgttttcaactgtaattgtcttaatggaaatgttaaaattcatatctgattaacatttttaataacttagaggagattttaactttatttaaaaataggtaaaattattgtacctaattatgtctaaagtttattcaggggtaatttccctgatgtctgtataaaatcaagatcttattttactgatgcataagtcctagtgggtcaagactaggcatatgctttcagataaataaggaattactccaatcagttttccccaatcaaagaagccatgtcattttacttttagaaacatacaattgggcccaatatgggaattttcataatagttcatacatttgtcagccaacattaaaaggtaaccaactcctcaggtatttgtagtttaccctaacgcttctttaaaagaaagtaggtaaaaaaagaaaagggtagataatctttcgtatgcaaacttttcccttatattttgtctttctttcctttttgactttagtagcatcctccacacatttgtgtgcctgatttgaaaggaagctggggcacccagcgagtttagcctttaagtttctgtgtattgatttgcagattaagtaatgctgagaggaataaagaagggacagaaacatggaacataaagcattgaaaattccggtgcttgggcttcggcttcagagtaacgtcagtggcttagggttaaacggccattttattcaaatgcttgctatacaatctgaaaacacactggcaggtgctcctctccttggcaattcattgagtatccagagttctacgatgtttaactgaagaattggctaatgttttgatcctccagtgtgactgttgtttttgtttgggggtgggtttggggttttttgcttttttattcctgaagcttaccagatatgaatggctaatactccattgttctgcttgttgtaatggtgaatgctttaagaaaaaaaagtgtaatttgctaagaataattcatgatctgtttatgcgataactcctttttgttacaatttttttaaaaaaagctatttttgttaatgtaaagtaaatatttcagagcaaattttttaaacttattgcactaaatacaggctctgtac

SEQ ID NO: 238 - DNA, 2494 bp, Homo sapiens
aattctcacaacaaaagtcttgaagccggtagtggagttactgagtaatccagattacattaaccaaatgctgcttgcccagctggcgtacagagagcaaatgaatgagcatcacaagagagcctacacctatgccccctcttacgaggacttcatcaagctcattaacagcaactctgatgtggagttcttgaagcaactaaggtatcaaattgtagtggaaataatccaggcgactacaattagcagctttccccaactgaagaggcacaaaggtaaagaaactgcggcaatgaaagctgatctcctgagggccaggaacatgaagaggtacatcaaccaactgactgtggcaaagaagcagtgtgagaagagaatccgaatcctgggaggccctgcctatgaccagcaagaggatggggccctggatgagggggaagggcctcaaagccagaagaatgaaattccacaattagttggtgaaatttatcagaatttctttgtggagagcaaagaaatatctgtggaaaaatcactttacaaagaaattcagcagtgtcttgtaggaaataaaggtattgaagtattctacaaaatccaggaagatgtttatgagaccctaaaggataggtattacccttcatttattgtcagtgacctgtatgagaaattgttgataaaagaggaagaaaaacatgcctcacagatgatttccaacaaggatgagatgggcccaagagatgaggctggtgaggaagccgtggatgatggtaccaatcagatcaatgaacaagccagttttgctgtaaacaaactgcgagaactaaatgagaaacttgaatataaaaggcaagctctaaattctattcaaaatgcaccaaaacctgacaagaagattgtttccaagttgaaggatgaaataatcctaatagagaaagaacgcacagaccttcagctgcacatggcaagaacggattggtggtgtgaaaaccttggcatgtggaaagcctccatcaccagtggagaggttacagaagagaatggtgagcaattgccatgttactttgtcatggtaagcctacaagaagttggaggagttgaaactaagaactggacggtccccagaaggctcagcgagtttcagaatttacaccggaaactcagtgagtgcgtcccttctttaaaaaaagtccagttgccttctcttagcaagctgcctttcaaatctatagatcaaaagtttatggaaaagtcgaagaatcaattaaataagtttttacagaatctgctttcagatgaaagactgtgtcagagtgaagcactttatgccttcttgagcccttctcctgactacctcaaggttatcgacgtgcaggggaaaaaaaattctttttcattatcctcatttttggaaagacttcctcgcgacttcttctcccaccaggaggaggagacagaggaggacagtgacctgtcagattatggtgatgatgtggatgggaggaaagacgccttggctgaaccatgtttcatgttgattggggagatttttgaacttcgaggaatgtttaaatgggtgagaagaacattaattgccctcgttcaggtcactttggaagaaccatcaacaaacaaatccgggacacagtcagctggattttcagtgagcaaatgttggtttactacatcaatattttccgggatgctttttggccaaatgggaagttggcaccaccgaccacaatcagaagcaaagagcaaagtcaggaaacaaaacagagagcacagcaaaagctgcttgaaaacattccagatatgcttcagagccttgttggacagcaaaatgcccgccacggtataataaaaatattcaatgcactgcaagaaacaagagccaacaagcatctgttatatgcgctgatggaactgctgctaattgaactgtgtcctgagctgagagttcatttagatcaacttaaagctggccaagtttgagactacacaaataaaccaccagaaaaatgtctgtgtaataatagacatgaaacattttcctcttttccacagagggcttaactgagaaccgtattgatttttattttagttacctccctctagttttatgtgaaattagtagaatcagggaggacgggacttatgctgtggtaggcaacagaaaaaaacttctattgattttaatttaatatgaatactttaaagatcaacataccgattgaaatacaaatgttaatatgtgagaacctaggaagtattttaaatatttatgaaaatattttgttttaaaatgaactatgaatattgtacagttaatttcctcactgaggactgtgaacattcttatattatttcatgtatattgaagaacattgttatgcaatgctttgtgtaaagttattgtgaagattttattgtctttatttttaccaaagatttcccatagtttgagcattcaaagcaataaaatataaaaatg

SEQ ID NO: 239 - DNA, 2903 bp, Homo sapiens
cagtctcaagatcctcaggtatccactaaaactggagagcctttgatgtctgaatctacctcccacattgaccaaggtccacgtgaccattctgtgcagctgccaaaaccagtgcataagccaaatcggtggtgcttttacagttcttgtgaacagctagaccagcttattgaagctcttaattctagaggacatagagaaagtgccttaaaagaaactttgttacaagagaaaagcagaatatgtgcacagctagcccgtttttctgaagagaaatttcatttttcagacaaacctcagcctgatagcaaaccaacatatagtcggggaagatcttcccatgcatctgatccatctcagatgtgtgcagaaaagcaacttgaactaaggctgagagattttcttttagatattgaagatagaatctaccaaggaacattaggagccatcaaggttacagatcgacatatctggagatcagcattagaaagtggacggtatgagctgttaagtgaggaaaacaaggaaaatgggataattaaaactgtgaatgaagatgtagaagagatggaaattgatgaacaaacaaaggtcatagtaaaagacagacttttggggataaaaacagaaactccaagtactgtatcaacaaatgcaagtacaccacaatcagtgagcagtgtggttcattatctggcaatggcactctttcaaatagagcagggcattgagcggcgttttctgaaagctccacttgatgccagtgacagtgggcgttcttataaaacagttctggaccgttggagagagtctctcctttcttctgctagtctatcccaagtttttcttcacctatccaccttggatcgtagcgtgatatggtctaaatctatactgaatgcgcgttgcaagatatgtcgaaagaaaggcgatgctgaaaacatggttctttgtgatggctgtgataggggtcatcatacctactgtgttcgaccaaagctcaagactgtgcctgaaggagactggttttgtcccgaatgtcgaccaaagcaacgttctagaagactctcctctagacagagaccatccttggaaagtgatgaagatgtggaagacagtatgggaggtgaggatgatgaagttgatggcgatgaagaagaaggtcaaagtgaggaggaagagtatgaggtagaacaagatgaagatgactctcaagaagaggaagaagtcagcctacccaaacgaggaagaccacaagttagattgccagttaaaacaagagggaaacttagctcttctttctcaagtcgtggccaacaacaagaacctggaagatacccttcaaggagtcagcagagcacacccaaaacaactgtttcttctaaaactggtagaagcctaagaaagataaactctgctcctcctacagaaacaaaatctttaagaattgccagtcgttctactcgccacagtcatggcccactgcaagcagatgtatttgtggaattgcttagtcttcgtagaaaacgcagaggcaggaaaagtgctaataatacaccagaaaatagtcccaacttccctaacttcagagtcattgccacaaagtcaagtgaacagtcaagatctgtaaatattgcttcaaaactttctctccaagagagtgaatccaaaagaagatgcagaaaaagacaatctccagagccatcgcctgtgacactgggtcgaaggagttctggccgacagggaggagttcatgaattgtctgcttttgaacaacttgttgtagaattggtacgacatgatgacagctggccttttttgaaacttgtttctaaaatccaggtcccagactactatgacatcatcaaaaagcccattgccttaaatataattcgtgaaaaagtgaataagtgtgaatataaattagcatctgagtttattgatgacattgagttaatgttttcgaactgctttgaatacaaccctcgtaacacaagtgaagcaaaagctggaactaggcttcaagcattttttcatattcaggctcaaaagcttggactccacgtcacacccagtaatgtggaccaagttagcacaccaccggctgcgaaaaagtcacgaatctgactttgtccttctaaaggatatatttgaagaaaaacaaattgttcatgaaaatggaacattaaatcatgctgtataaagcaataacaattggttgaccacatgaaagtgtggcctgcactatattctcaattttaatattaagcactcaggagaatgtaggaaagatatcctttgctacagttttgttcagtatctaataagtttgatagatgtattggatacagtactggtttacagaggtttttgtacatttttgagatcattcatgtgtccagagatcttggaaaatatttttttcacccacgatttattttgttattgatgatttttttttaaagtggtggtattaagggagagttatctacatggatgagtcttccgctatagcacagtttagaaaaggtgtttatgtcttaattaattgtttgagtacattctttcaacactacacatgaatgaatccaatcttataaccttgaagtgctgtaccagtgctggctgcaggtattaagtccaagtttattaactagatatttatttagtattgagagtaatttgtgaatttgttttgtatttataaaatttatacctgaaaaatgttccttaatgttttaaaccttttactgtgtttttattcctctaacttccttaatgatcaatcaaaaaaagtaacaccctccctttttcctgacagttctttcagctttacagaactgtattataagtttctatgtataactttttaactgtacaaataaaataacattttttcaaat

SEQ ID NO: 240 - DNA, 2330 bp, Homo sapiens
gcccgccccgcctctaggcgccggccccggagcccggtccgcgagcagcggcggctgccggagggacgatgagctgcgcggggcgggcgggccctgcccggctcgccgcgctcgccctgctgacctgcagcctgtggccggcacgggcagacaacgcgagccaggagtactacacagcgctcatcaacgtgacggtgcaggagcccggccgcggcgccccgctcacgtttcgcatcgaccgcgggcgctacgggcttgactcccccaaggccgaggtccgcggccaggtgctggcgccgctgccctccacggagttgctgatcatctgggctgtgatccacaaacccggttctttgtccctcctaatatcaaacagtggattgccttgctgcagaggggaaactgcacgtttaaagagaaaatatcacgggccgctttccacaatgcagttgctgtagtcatctacaataataaatccaaagaggagccagttaccatgactcatccaggcactggagatattattgctgtcatgataacagaattgaggggtaaggatattttgagttatctggagaaaaacatctctgtacaaatgacaatagctgttggaactcgaatgccaccgaagaacttcagccgtggctctctagtcttcgtgtcaatatcctttattgttttgatgattatttcttcagcatggctcatattctacttcattcagaagatcaggtacacaaatgcacgcgacaggaaccagcgtcgtctcggagatgcagccaagaaagccatcagtaaattgacaaccaggacagtaaagaagggtgacaaggaaactgacccagactttgatcattgtggcagtctgcatagagagctataagcagaatgatgtcgtccgaattctcccctgcaagtatgtcaacttcatttgtttgagaaagaatgatattaatgtgctttgtatgcctccttttcagggtgggcatctcccttgcttttgagcgccacccacctcgtggctttctggaggccaagtccgctgtgcattgctggccatggggctgaggccagcagggagtggtgctgttcagcaggtgcgggctgcacggccttccgaggtgtagccaatatgcgatgtggcacgcggcctccagactccccagacacagcctaggagtgttgaggtcgagaattcttgttctatggtttcgtttatctttttatgtttgttttcttttatttatttatttatttattttttgagacggagtctcgctctgtcaccccaggctggagtgtgcagtggcgcaatctcggctcactgcaagctccgcctcctgggttcatgccattctcctgcctcagcctcccgagtagctgggactacaggtacccaccaccatgcccagataatttttgtatttttagtagagacggggtttcatcatgttggccagttggtcttgaactcctgacctcaggtgatctgcctgcctcagcctcccaaagtcctgggattacaggcgtgagccaccgcacccggcctgttttctttaaagatggggttctcactatgttgcgcacagctgaacatgaactcctgggctcaagcagtcctcctgccttgtcctctcaaagtgttgggattacaggcatgagtcactgtgcttggcaagtgggtttcaaaaacagccccttgttcctctccatcttagactacatctctaagcccttcagtgagacttccatcgagctcacctggctctgggtacaacaactccagggacttggattaaatctttttctaaacctggattatgcaaaatggaaagaactgatacctgctttgtgcctgctgtggttcagatgctctgctctgagcagactatactcactgtctcctataattctcccagcagtcctaagagggtgtgttttccccgttgtacagtgaaggatggtgagccgatagcaggttccagggtcgcacaattcagaaatggcagagctgtgtcaaggcctgcctttaatgtggtgctccccacatgggaccaagccttcctccatgaggaaaggactcgcctgtgcctggttgccctggaaacagcatgttggtttctcctgtggctcctctcaagctggggagcatgaaactaagatacacagttctgagtatcaattggataaataggaaatcacctgccaagaagcctaaaaccaaagagtttgcctcttcctcctcccttccctttaaaagacatccacacaactccagccttataatatggagcatgtgaattaataaaataattgtgagttgttatctc

SEQ ID NO: 241 - DNA, 2378 bp, Homo sapiens
ggctgatacatctctgaaaaatgaattattgaagtatggcggttaggcccagctggtgatggtgtatcaagaagtatatttgcaaatatttttttaaaatgggtatataatctgtctcagaatattcaagaagatgatcttcaacatttgcaattatttacagagtatggaagacttgcgatggaagaaatctaccagaaaccatttcagacattaatgtttttgattcgagattggagctatccttatgaacattcatatggtttggaaggtggaaagcaatttcttgaaaagagattacaggtaaaacaaaatcaacatgaagagcttcagaatgtaaggaagcacatacacaattgtttctcaaatcttggttgcttccttttgccacatcctggtcttaaagttgcaactaatcctagttttgatgggagattgaaagatattgatgaagactttaaacgcgagcttcgaaatctggttccattgctgcttgcccctgaaaatttggtagaaaaagagataagtggatctaaagtcacttgtagagatcttgtagaatattttaaggcttacatcaaaatctatcaaggagaagaacttccacatccaaagtccatgcttcaggcaacagctgaagctaataatcttgctgcagtagcaggagcaagagatacctattgtaaaagtatggaacaggtatgtggaggggacaagccttacattgcaccttcagatctggagcgaaaacacttggatctcaaggaagtggcgataaaacaatttcgttcagtaaaaaagatgggtggagatgagttctgccgtcgttatcaggaccagcttgaagctgaaattgaagaaacctatgcaaattttataaagcacaatgatggcaaaaatatcttctatgctgctcgtaccccagccacactgtttgcggtcatgtttgctatgtatataatctcaggactgactggcttcattggcctaaactctatagctgtcttgtgtaaccttgtcatggggttagcactgatatttctttgtacttgggcatatgttaaatactctggggagttcagagaaattggaacagtgattgatcagattgctgaaacactatgggaacaggtattgaagcccctgggtgataatttgatggaggaaaacataaggcagtctgtaacaaactctatcaaagcaggcctgactgaccaggtgtctcatcatgccagattaaagacagactgacagttcatctcctcacggactccactctcttttttttcatgcttgctgtacaatgagaactcaaataaaaataaaccaaagtttacaatcaactgtagaagtagtttagtgtaactggcttcacagatggctgccacagagtgtgaagattgtttgttagttttaagcattcttttaatggctcctaagacatgcagatggactgaggagcattggttaatcatgcacctttgtgccatgtttaactcttttatttctttttacttaatctaatgttagtgaatttgtcttatgtaaaaggatatttcagggaaatattttcagaaatctatttagagtctctttaacacagtgtcccattgaaattttaatttttagagaatttatgaatcactgtttcaagaaccagattggaaagacaatgaagcctttattgagccactacattaaaagtatatattgctttactgccttcaataccagtattacatcaatgcatgtatcagaaacttcacagaaattacatggcaactcttgtagctaagaaagtaattctgaggtgtacatttgtcttgcctttttaaatttataaacttgccctaaaaggagatgcatatctgggaaactgaactgtctttttgcagtttagccttcatgtatataaaatatgccattaattttattggggaagaaattccatccaaaaatgttgcctacagctatgagttaagagtgtctgtacagtgtgtagcttttattttctaaaatcacagatagggcatgtatatgacttataaatatataaatacgattttgtattaaaagttttgtagtttatggcaaaatctggtcctgtggtaggctaaataagtactgtccctgtgaaaggaatgtttgtggctcatgtcagtgtgtgaatgcatagacaatttgaagtttttgatatatttgtgatatttatcttgagcactgcaatctcaccccccccccgccgacgaagggaattcaatgggaatgtttattgtgactttgtcctctgttgcattttaaagttatttcctgtaatttattttcagtacataattaaaaatttgttgtatatataaacccgattgaattctagacct

SEQ ID NO: 242 - DNA, 3634 bp, Homo sapiens
cttggatctcaaggaagtggcgataaaacaatttcgttcagtaaaaaagatgggtgaagatgagttctgccgtcgttatcaggaccagcttgaagctgaaattgaagaaacctatgcaaattttataaagcacaatgatggcaaaaatatcttctatgctgctcgtaccccagccacactgtttgcggtcatgtttgctatgtatataatctcaggactgactggcttcattggcctaaactctatagctgtcttgtgtaaccttgtcatggggttagcactgatatttctttgtacttgggcatatgttaaatactctggggagttcagagaaattggaacagtgattgatcagattgctgaaacactatgggaacaggttggtatctatcttttggttttttagtgactaatcttattttcctgtgactttccatcctttgcagtatttgtactccgactttgccttcatgtgaggaatgtcaaaaggatgtcttctgttttgttcagatgtagaatctttatgaattgaagattttttctttaaagttataattttaatgtactttggttagcctaaatctgtactatcctctggatagattcttagttgtaggcctgattgtatcagacggtgggcagggtcagagtctgtaatgatttttttctttgaggaaagaaaatataaacaatgaatgattttcaaggtaaggaaaagaagtttggaagtggtgctttcggaaagcaaaagaagtttcttcctaatattggcaagcagcaatgcaggagaaatgctggatggtagacaggtcttcattgccttccatgaagatggtagtgatttcctgatgtactatgaggaacaatcccgtagggatttcttaccaaggaaactttgacctttgtgttttggaaatattaattagtaaagcaaagcgccatgaacagagaaccatgctccgtcgtaatcttttacctcgaaccagaattcaaagccccaggctgtgaactcttgcctgcaagtatctgcttaggaaagccattttgtgtatctgcctccggtgtgctggaattacctgtggaccgcttatggatgtcattaagatgatcttcgtgaaatacttgaacatcatgtcaaggaccagaatgaaagctacggttattaatgacgaacgctgtaataggcatttgagatgccatttttgggctcatgaaatattgagcttattttgaagatctaggatatgcaggtccatgtttgttttggctataaacttgaagaccgaagaagcagaccattttttttgaagaaagttgattggatattgacttttcttgtaatgatgttattttataaagtgacccactatattaatttggattttgtgtttactctttagagaaatgctctattcagatccgattgggaagtttatgtttggatatttattctatttaaatttttatctcaatctcactacttgatgtttctttgatatcttctaatagaagatggatgcaaagctatcgcaacttcacttttaagaaaaaattagctattttaaaattttggatcattttctgcaatataattttcaataattgtacaatatcttcttttgagaaatattcatctcttaaacagcattgattctaggattttggaggtaccattattacaaaacaattaaatggaagaatctaaagtgtataaaatcattttcagtatagtttaggtaaggtaatcagctagtcagagatctgtgctgtgtcaacaaaccttgtctaaatttctttgcatttctcttttcttttgcttcagaggagtcccaggaaggtgagaaacctacagtctcaaattcttgtagtcttaaactctttagcttcgaggcactctgattcattctcctaacaaatcacttcatgttttaggtgttttccaaactgtttgaagttactagacgtcgaatggttcaccgtgctctttcatcagcacagcgacagagactgtcatccaacaataacaagaagaaaaattagacagtatttttaacctttttctctatctgaagtgttcacacttacacatgtaggacaataagcaggaccgtctgggccggtctgcataaatgctgtatacataccagatttgatgctgcatatagggtatggaattgcacatccatctcataggaattgtaaatggtttgaataagaggaaagtaatttttgttgcattataaaatgtctagtagcatcataagtttttttgagagaagcatctttttatttcccatattcctggttattttcatcattgctttgaattgaatttttatatctatttttatatgtaactctttttttacctcatgtttttgtttgttttgcacatttctcataccacaggtattgaagcccctgggtgataatttgatggaggaaaacataaggcagtctgtaacaaactctatcaaagcaggcctgactgaccaggtgtctcatcatgccagattaaagacagactgacagttcatctcctcacggactccactctctttttttttcatgcttgctgtacaatgagaactcaaataaaaataaaccaaagtttacaatcaactgtagaagtagtttagtgtaactggcttcacagatggctgccacagagtgtgaagattgtttgttagttttaagcattcttttaatggctcctaagacatgcagatggactgaggagcattggttaatcatgcacctttgtgccatgtttaactcttttatttctttttacttaatctaatgttagtgaatttgtcttatgtaaaaggatatttcagggaaatattttcagaaatctatttagagtctctttaacacagtgtcccattgaaattttaatttttagagaatttatgaatcactgtttcaagaaccagattggaaagacaatgaagcctttattgagccactacattaaaagtatatattgctttactgccttcaataccagtattacatcaatgcatgtatcagaaacttcacagaaattacatggcaactcttgtagctaagaaagtaattctgaggtgtacatttgtcttgcctttttaaatttataaacttgccctaaaaggagatgcatatctgggaaactgaactgtctttttgcagtttagccttcatgtatataaaatatgccattaattttattggggaagaaattccatccaaaaatgttgcctacagctatgagttaagagtgtctgtacagtgtgtagcttttattttctaaaatcacagatagggcatgtatatgacttataaatatataaatacgattttgtattaaaagttttgtagtttatggcaaaatctggtcctgtggtaggctaaataagtactgtccctgtgaaaggaatgtttgtggctcatgtcagtgtgtgaatgcatagacaatttgaagtttttgatatatttgtgatatttatcttgagcactgcaatctcaccccccccccgcccaccaagggaattcaatgggaatgtttattgtgactttgtcctctgttgcattttaaagttatttcctgtaatttattttcagtacataattaaaaatttgttgtatatat

SEQ ID NO: 243 - DNA, 2405 bp, Homo sapiens
caagtttggaatgaagtatttgtgattgacagacctaatggaactaaagttgctgtgctgcttatggatacccagggtgcctttgatagccagtcaactatcaaagactgtgcaacggtgtttgctctgagcactatgactagctctgtccaggtatataatctgtctcagaatattcaagaagatgatcttcaacatttgcaattatttacagagtatggaagacttgcgatggaagaaatctaccagaaaccatttcagacattaatgtttttgattcgagattggagctatccttatgaacattcatatggtttggaaggtggaaagcaatttcttgaaaagagattacaggtaaaacaaaatcaacatgaagagcttcagaatgtaaggaagcacatacacaattgtttctcaaatcttggttgcttccttttgccacatcctggtcttaaagttgcaactaatcctagttttgatgggagattgaaagatattgatgaagactttaaacgcgagcttcgaaatctggttccattgctgcttgcccctgaaaatttggtagaaaaagagataagtggatctaaagtcacttgtagagatcttgtagaatattttaaggcttacatcaaaatctatcaaggagaagaacttccacatccaaagtccatgcttcaggcaacagctgaagctaataatcttgctgcagtagcaggagcaagagatacctattgtaaaagtatggaacaggtatgtggaggggacaagccttacattgcaccttcagatctggagcgaaaacacttggatctcaaggaagtggcgataaaacaatttcgttcagtaaaaaagatgggtggagatgagttctgccgtcgttatcaggaccagcttgaagctgaaattgaagaaacctatgcaaattttataaagcacaatgatggcaaaaatatcttctatgctgctcgtaccccagccacactgtttgcggtcatgtttgctatgtatataatctcaggactgactggcttcattggcctaaactctatagctgtcttgtgtaaccttgtcatggggttagcactgatatttctttgtacttgggcatatgttaaatactctggggagttcagagaaattggaacagtgattgatcagattgctgaaacactatgggaacaggtattgaagcccctgggtgataatttgatggaggaaaacataaggcagtctgtaacaaactctatcaaagcaggcctgactgaccaggtgtctcatcatgccagattaaagacagactgacagttcatctcctcacggactccactctctttttttttcatgcttgctgtacaatgagaactcaaataaaaataaaccaaagtttacaatcaactgtagaagtagtttagtgtaactggcttcacagatggctgccacagagtgtgaagattgtttgttagttttaagcattcttttaatggctcctaagacatgcagatggactgaggagcattggttaatcatgcacctttgtgccatgtttaactcttttatttctttttacttaatctaatgttagtgaatttgtcttatgtaaaaggatatttcagggaaatattttcagaaatctatttagagtctctttaacacagtgtcccattgaaattttaatttttagagaatttatgaatcactgtttcaagaaccagattggaaagacaatgaagcctttattgagccactacattaaaagtatatattgctttactgccttcaataccagtattacatcaatgcatgtatcagaaacttcacagaaattacatggcaactcttgtagctaagaaagtaattctgaggtgtacatttgtcttgcctttttaaatttataaacttgccctaaaaggagatgcatatctgggaaactgaactgtctttttgcagtttagccttcatgtatataaaatatgccattaattttattggggaagaaattccatccaaaaatgttgcctacagctatgagttaagagtgtctgtacagtgtgtagcttttattttctaaaatcacagatagggcatgtatatgacttataaatatataaatacgattttgtattaaaagttttgtagtttatggcaaaatctggtcctgtggtaggctaaataagtactgtccctgtgaaaggaatgtttgtggctcatgtcagtgtgtgaatgcatagacaatttgaagtttttgatatatttgtgatatttatcttgagcactgcaatctcaccccccccccgcccaccaagggaattcaatgggaatgtttattgtgactttgtcctctgttgcattttaaagttatttcctgtaatttattttcagtacataattaaaaatttgttgtatat

SEQ ID NO: 244 - DNA, 1747 bp, Homo sapiens
  misc_feature 1746: n = a,c,g, or t
ccaaagtccatgcttcaggcaacagctgaagctaataatcttgctgcagtagcaggagcaagagatacctattgtaaaagtatggaacaggtatgtggaggggacaagccttacattgcaccttcagatctggagcgaaaacacttggatctcaaggaagtggcgataaaacaatttcgttcagtaaaaaagatgggtggagatgagttctgccgtcgttatcaggaccagcttgaagctgaaattgaagaaacctatgcaaattttataaagcacaatgatggcaaaaatatcttctatgctgctcgtaccccagccacactgtttgcggtcatgtttgctatgtatataatctcaggactgactggcttcattggcctaaactctatagctgtcttgtgtaaccttgtcatggggttagcactgatatttctttgtacttgggcatatgttaaatactctggggagttcagagaaattggaacagtgattgatcagattgctgaaacactatgggaacaggtattgaagcccctgggtgataatttgatggaggaaaacataaggcagtctgtaacaaactctatcaaagcaggcctgactgaccaggtgtctcatcatgccagattaaagacagactgacagttcatctcctcacggactccactctctttttttttcatgcttgctgtacaatgagaactcaaataaaaataaaccaaagtttacaatcaactgtagaagtagtttagtgtaactggcttcacagatggctgccacagagtgtgaagattgtttgttagttttaagcattcttttaatggctcctaagacatgcagatggactgaggagcattggttaatcatgcacctttgtgccatgtttaactcttttatttctttttacttaatctaatgttagtgaatttgtcttatgtaaaaggatatttcagggaaatattttcagaaatctatttagagtctctttaacacagtgtcccattgaaattttaatttttagagaatttatgaatcactgtttcaagaaccagattggaaagacaatgaagcctttattgagccactacattaaaagtatatattgctttactgccttcaataccagtattacatcaatgcatgtatcagaaacttcacagaaattacatggcaactcttgtagctaagaaagtaattctgaggtgtacatttgtcttgcctttttaaatttataaacttgccctaaaaggagatgcatatctgggaaactgaactgtctttttgcagtttagccttcatgtatataaaatatgccattaattttattggggaagaaattccatccaaaaatgttgcctacagctatgagttaagagtgtctgtacagtgtgtagcttttattttctaaaatcacagatagggcatgtatatgacttataaatatataaatacgattttgtattaaaagttttgtagtttatggcaaaatctggtcctgtggtaggctaaataagtactgtccctgtgaaaggaatgtttgtggctcatgtcagtgtgtgaatgcatagacaatttgaagtttttgatatatttgtgatatttatcttgagcactgcaatctcaccccccccccgcccaccaagggaattcaatgggaatgtttattgtgactttgtcctctgttgcattttaaagttatttcctgtaatttattttcagtacataattaaaaatttgttgtatatnt

SEQ ID NO: 245 - DNA, 1198 bp, Homo sapiens
gtgtcctgccacaacctgccttgtataaacatgtacattttttcataacattttgaacaaggtttatattgactcaagtttaaaaacaaaaagtgtgactgaaaaatttttacagagtctagtgcaccaatgctgatgtgaggggttgtgtatgcgagtgaagaaaatgtgtattctggtggcctgaagctttactggacaaggatgtgtgagagtgcagagatatatttagtgacacagtagagaggcaaaaaaaaagctaaaattccaaatgtatattttttcgtattgccctgtcctcacccagaaatgatcaattcctgttactgtattaacccttgttattaggaactctaagccatgccagaacaccgtccctccccttggaccgtgtagattctgccctgggtccctagccccttgcagtgataaataactccagctaaaagtgtttggtgttcttatctccaccctctttcctactttgcttaccctcatcctcagacagatgcctcttgcttttaaaagttggatttaacgacgtgttgtagggttcttggtctgtgtgaaggcagagaccagagagaaggaagtgagcccactgctctcctgggagcaatgtgggtgagtccaccagaggccctgctgtgtgtggccaataaattttagtcttccccagccctcgaggcagtgtgtgtggatgtatgcgtgtggatatttatatatgtaccctgcactcatgaatgtatgaactggaggaagttactacagtggaagggttcttaataacaaggtctacctagcatgaagtatttaacattctcccattccttaaaaaatatacatttttataaaatgaaaaccataataaatgttttgaatattaaaaaaaataataacctacagaggaaaattaatggagacagctatttgccttgtactttttccacaattgttgctgctagttgtacacatctctagttcagctcttgcccacgggacactcatcaattaggttttatttttatttctttcctctacccccagaaacaagcctgttaattttttttccttctcctctggcgactgtgtgatgaatcctttcttgcgtgatcaggttgcggatagacttgtaagggtgtttgctgcatacagtgtaagcattgtgaccgccaataaacttcaatggtttctactg

SEQ ID NO: 246 - DNA, 1146 bp, Homo sapiens
tacggccctgtaacagggccatggagaagctgcggcgagtcctgagcggccaggacgacgaggagcagggcctgactgcgcaggtcctggatgcctcatcccttagtttcaacaccagattgaaatggtttgccatctgcttcgtatgtggcgttttcttttctattcttggaactggattgctgtggcttccgggcggcataaagctttttgcagtgttttataccctcggcaatcttgctgcgttagccagtacatgctttttaatgggacctgtgaagcaactgaagaaaatgtttgaagcaacaagattgcttgcaacaattgttatgcttttgtgtttcatatttaccctgtgtgctgctctttggtggcataagaagggactggctgtgttattctgcatattgcagttcttgtcaatgacctgttcccagatgatgctctcactgctggtcggggtcacactttgagaaccactgtacagtctcatgctgctgtatttattataaggttagacatggccttttggcataaaggaaaaccatcattcagatgaagattcaacatgcttgaatatttcttgcaggtatagcctgtcgtacatcccatatgcaagggatgcagttattaaatgctgttcttctctcctaagttgaaaatcagaaacttgtggaaaagagcacttgaatgttggtactctatgtttggtgaagtttgcttttccccataaaacactccaggaacaactgacgtgacagttgaagaccgttttgtactaagtctcattttgtatactggtaaaaactacatgcttgattaaaccattaaatgcttgtaactttaaattcattatgtgtcattaatatacttttccaaagataagatttttaatcactgccagttgtaaattatttttagccaatttttaaatcttttcaaagcagctttgaaatgtgaatatttaaaggtagacctgtgctgcaagataattaaacttttttgcttttaaaaaatgtctgcatttttaagattttttttactttaaatgtgaaacttattttaagctaaaaattgcttattatatgtaataaaaataatatataaatctttacaattttgaaataaacccatccttggaaaaat

SEQ ID NO: 247 - DNA, 2260 bp, Homo sapiens
agtatatgtgttattctgtgagtcattcaacattcttgaagtccatcaatgtgttaggcttttgtgttatgtatgaggatttttaacaagttttaacagatattcaggaacacttagttattgtgacatttcatagattatggaagcaaaagcagagacaccacttaaaacaatttgcagatcagttaaactaacacttgatatgcattatcatgatgctgcatggcaatccgaccaaaaagtattggatccaccagactaaccagggtaacaagactcagagttagtatacacataactatacacatttgtatatattcactgttaactaaaacttagttttaacagtgtaccttatgatcgaaagtggttgttcaaaaaatgcctgtaaacattcctctgaatatattcctgttattttataatcacattaatattacatactgttacgtttgttttatatgtgagtctggcattataaatgctggctgaatgaattgggctaagacaactacaacagatgtgatcaagaaaccgatagtgattaccagaaattatatttggtgcttactctgatgatgctcttaagttttttacagactatatgaactcctttaattttcacaaccaccctttgaggtagatacatttctaatccccatgtacaaatgagacaaaggcacagaggttagttcacatagctatgaggcacaggcagaattcaaacacaggcagtttggcttcagagaccatgatcttaactgctatgctctgatgtctctccaaaaaagtataaacatgagcagggttaattgtagcagctacttggtttttacgtcaagaatcataaaccacaagaggaaacatgaagtttttgttttttacttttcaagatggagtctcgctctgtcactcaggctggagtgcagtggccctatctcagctcactgcaacctcagcctccagggttcaagtgattttcctgcctcagcctcccaagtagctgggattacaggtgtgtgccacacctggctaatttttgtatttttagtagagacagggtttcaccatattggtcagactggtcttgaactcctgacctctggtgatccactcgcctcggcctcccaaagtgctgggattacaggcgtcagctaccgtgtccagccgaaacatgaagtttcaaaatgccaagatgtatcacagaagacactcagcagtcagccacatttatcttggagaagagttccaggacttaaatgtttgaatagtataaactagttttttaaaaagtctgcctgaagccgaagattaaatactttaaaaagttcactgggtgatcttggcatgttgacattatcttaacagtctaagcttgttaccttacaccaacctgacaggttcattagaagcacatgaatacatataaaaggcataaaagactgggtcaatgaatatgagctctgaattctaaaattcctttgcatttctaggcagtacttaccatagtatgtttacgtacctggtgagtgacaatgctcaaaaatttctgaagtattcatccacattatgctagcgaaatgtcaaattgtcctttaatattcaaatgcatgaaccatcactccttggccttttggccaagatcaagtgtagtatcaaatgcatgaaccatgaaagctatcttaaaaggaaagtaacatttaaaggaattgaatataaaccttcggttaatcttgctagcacgtagtcaatacatcagtatttttctgccccttttatagtcttactggaaatgactgtaaaacagaaacaaagctaagccatggtaaatagaacattaaatgcccaacctaatttattttgctaagagaaactgatgaactaaaagagaaacaactattgtctacattttagatatgggggaaaaaaccctgagattactaattatgtatcaccatcctcttaatgtagatcctgaaaatgatggtatcaatataatacatacagtggattcaccttttaaactggatctattacctttgatatttgtcttacactgaaaaattctgacatcttcaggaaaccaatatgatggataagctaaatgttgacttaaaatagttaaaccccttaataacatcctttagtttctattatttcactgcttaagttcagcatctgaataacaaaggtaacataagtagtacttaagatcccaaaggcccattacattctatcaataaagacaaaacaaaactac

SEQ ID NO: 248 - DNA, 1569 bp, Homo sapiens
gacctgcggccgcaggtctagaattcaatcggccaaagaggcctaagacatctctgcatctttgtacctgcaagtgccatctttaagggggaaactacatgaagtcaccgttacagtaacttgatgtgtatattaataaaagtaattcagtcattttagtttttgattgaaaataaaggtagggcttctaaaaacttcatcatcttgataagttaaaaaatgaaagttatgacattagctttaaaggtgtaaaaaagatgtttcactaatgtaacggtgaaagagaatccctgttgtactttatctttttgtaatattatttttgaatttttcattatgttgcttttgaaatttgatgcattcctcccatttactttattattgtacacatttaacacacagtagcaaattttgaacgatgtgattgatataacctaacaaatctgagccagttattattagagttgcagaatagaaacttgaagtgctaaatggaataatccaaaggaaattttttaaatgcaggttctagctgaaaaattcaactataagaaaattgtatttatataacatttactatttttgaagactagtgagatttctgtaataattttaattctttaaaaagtgaaagcttgttgtaaagatattttctttttgttattagaaggaaatacaaagagaaaaatttctttctttcatgggcatttgataatttcagtctttgactgatttgtaagcctagaatatactaagctgaataacagctctttggcctcagaattttcagtagccagtatttctgattaactaagttgaaactcttattagaaactttcagttggtgatattgtattctagaagatataaatgagaggtttggcttcatctcagtttagaaatttattcaaagctaaagatgtatatatacatatacttttgtgtgtatatatacacatatgtgtgtatgcagtttgtcaggttatatatagaatttctattaaggattttttaaatggacaagcaatagggggttgaagtgtttatctgatttgtttaaaattttgtatatcaccaaatttttaaaaagtgatagtcacagtgctaagttatctagttggctactattacaccttaaaaattgagtttacacacacacaattacctgtttatatggtgctcatttgttattctcaaatataatgtgtgaccgtgatatagtgagaaagattctaccaaccactgtttcactactttttagttaaaattgggtatgttcttaatattcattagtgagaatcacaaagtattttgtagaaggcccaaatcacagaataaaggactaagagtggatttgctgacattccatactaatatacattgtttatgctttctttaaaataactagaagaacataaaagaaagagaatctcagaagtagtttgctgctaatatatacatatattgtataaaaaggtatattttggttttgttaaaacccttgttgacttttctacactgaacattttttttaacttgatttaataaaaatgttaattttggaagtgc

SEQ ID NO: 249 - DNA, 2916 bp, Homo sapiens
ggcgttcacgttcgcggccttctgctacatgctggcgctgctgctcactgccgcgctcatcttcttcgccatttggcacattatagcatttgatgagctgaagactgattacaagaatcctatagaccagtgtaataccctgaatccccttgtactcccagagtacctcatccacgctttcttctgtgtcatgtttctttgtgcagcagagtggcttacactgggtctcaatatgcccctcttggcatatcatatttggaggtatatgagtagaccagtgatgagtggcccaggactctatgaccctacaaccatcatgaatgcagatattctagcatattgtcagaaggaaggatggtgcaaattagctttttatcttctagcatttttttactacctatatggcatgatctatgttttggtgagctcttagaacaacacacagaagaattggtccagttaagtgcatgcaaaaagccaccaaatgaagggattctatccagcaagatcctgtccaagagtagcctgtggaatctgatcagttactttaaaaaatgactccttattttttaaatgtttccacatttttgcttgtggaaagactgttttcatatgttatactcagataaagattttaaatggtattacgtataaattaatataaaatgattacctctggtgttgacaggtttgaacttgcacttcttaaggaacagccataatcctctgaatgatgcattaattactgactgtcctagtacattggaagcttttgtttataggaacttgtagggctcattttggtttcattgaaacagtatctaattataaattagctgtagatatcaggtgcttctgatgaagtgaaaatgtatatctgactagtgggaaacttcatgggttcctcatctgtcatgtcgatgattatatatggatacatttacaaaaataaaaagcgggaattttcccttcgcttgaatattatccctgtatattgcatgaatgagagatttcccatatttccatcagagtaataaatatacttgctttaattcttaagcataagtaaacatgatataaaaatatatgctgaattacttgtgaagaatgcatttaaagctattttaaatgtgtttttatttgtaagacattacttattaagaaattggttattatgcttactgttctaatctggtggtaaaggtattcttaagaatttgcaggtactacagattttcaaaactgaatgagagaaaattgtataaccatcctgctgttcctttagtgcaatacaataaaactctgaaattaaaaaaaaaaaaaaaaagcggccgcaggtaggcctctttggccgaattcggccaaagaggcctagaaactgttggaggtgaagtatttgaaaacctggatggagacctgggtaattcaactgagaagcaagaatctgtgcaactggcagtaagaacagcagaaaaacttcttaaggaactaaaacctcagactgttcagggtcacgtacagcttcgcataatggaaaactattgcttaatggctaccaaacagaaatctaatgttgaacaagcattaaataccttcactgaaatagcagcatctgagaaggagcatatcccagcgctcttgggaatggcaacggcttatatgatcttgaaacagactccacgagccagaaaccagctgaagcgtattgcgaaaatgaattggaatgctattgatgctgaagagtttgagaagagttggctgctacttgctgatatttacattcaatcagcaaaatatgacatggcagaagacctgttaaaacggtgcctgcgtcataatagatcttgctgcaaagcttatgaatatatgggatacattatggaaaaagagcaagcatatacagatgctgccttgaactatgagatggcatggaaatatagcaatcggacaaatccggcagtaggatacaaactggcatttaattacttaaaagcaaaaagatatgtggattcaattgacatatgtcaccaggttcttgaagcacatccaacttatccaaaaatcagaaaggatatacttgataaggcccgtgcgtctttaagaccttgaaaataattttaacttaggtgttggtttaacaggaaatgaaagaaatctaactttcagttcttcctgttcaaaacaggtttgagctcagtgctttgttattagaagtatacccttttttctccagcagaggttgctgctgtacatcaagagaagtactatgtgaaattggtgtttcctaatggagttgaatgagagctggtctatttgactctgttttgattgggtacagatttggtgactctgtggtaaagactataattatttctataaagaatattttgttaaaatctaggtaattaaataccctgtatcttttctaaggaatattatttcaggaaatatatttaaaatgcattgttctcttttaaagtgtttttgttatattcttttatttatttatttatttttaaagacagagccttgatctgccgcccaggctggagtgcagtggcacgatcttggctcactgcaacctccgcctcctgggtttacgcgattctcctgcttcagcctcccgagtagctgggactaaaggcatgtgccatcacacccggctaattttttgtatttttagtagagatgggatttcaccgtgttagccaggaggggcttgatctcttgaccttgtgatccacctgcctcggcctcccaaagtgctgggattacaggcatgagccaccgcacccagcctgtttttgttgtattcggtgttgtttcaaaaattggaataaatctccctgtaaataactcatgaaaaagacaatatatatattttaaatatatattttaataaaggttttataaata

SEQ ID NO: 250 - DNA, 4035 bp, Homo sapiens
  misc_feature 2761: n = a,c,g, or t
gagatggggtttcaccatgttggccaggctggtctcaaactcctgacctcaagtgatccacccgcctcagcctcccaaagtgctgggattacaggcatgagccactgtgcctggcgtagaaagtatttcttataattaaaaacaacacccagtctaactagtataacacctaaaaaattgtcagatctgtattttagatagtacgacacagtgaaatgcaatggcacttaagcagagagaagaaggatttttctttttctttttttaaatagaaggtgttagaacctgaactgggcctggtttgcatttgggaagagtccagtggggaaacaacacaaataaggtcttgagaatgaagaattgcatttatatagggagttgtaacaaatggcctggagagtatctgactctttatgaaacatttaatgagaaatgtgacttgctttggtgcctatggttgaatttgttgcgatgcttctgacattatgaaaattttcaaacatgcaaaaaagttccagtagttatccagtgaattcttatactcaccacctatatctatagttaacattttacttgtattttatccagttatcagctcatctatgagatggcccttatttatttgcctgctgtttttattctctatttgtcctgttatttcttgttagagaagagaaggtgttcttagatcagaagatgccattgtattaggtgacggcaaggttttgctgatttagtggaacaagattctactgggatgtgtgctgagctgaaccaaggaactgcccgaatgtgctgaacaaggacatttgcttctcagatacgtgaattcaattttaagcaagattcttgatctgcttcagagcagctttgatttaaagtaatttcagagcgcttttccttgcatgagtaattttctgaatgtataaaatattctatttatgtttgaccttttggataaactgtgttgctgcagtgttggtccacactaccatcctaagtgaagacttagtaagtctgaggatctccaggcactggaaagagtgagaacctgggagtgaaagggttatagttagtgttcatttttcgggttttgtttcataaggagtcctgagtggggtaacctgaaatgttttaacagttgaagatcatcctattcctatccccagtaaaaataggcctttccacaatcttctaccagttaacttagctttttttttttttttttcctttaatagagtctcattcttgtcacccagactggagtgcgatggcacgatcttggctcactgcaaccctccctcccgggttccagcgattctcctgcctcagcctcccaagtagctgggattacaggcgcacgccaccatgcccagctaatttttgtatttttagtagacgtggggtttcaccatgttggccagactggtctcaaactcctgacctcaggcgatccgcccgtctaagccttccaaagtgctgggattactggcaggaaccaccaggcccagccaaccagcatttcttaaggtgaaaatacatggtgttaatttatattttgagtgagacccagtccagctgctataactgcttggacacttggcagaggacagagtactgcaaaagtgtctaagggagacagcattttgccttgggtgctgtagatgtacaagaggttccaggagggggtgataggcagaattttggtccccatcaccttccctgcccagtgttatgcctatgaatgtgttacattatgtggtaaaagggactttgcagatgtaactaaaatttctaaaatagagatattatcctggattacctgggggaacccagtgtaattacatgaacccttaaaaatggaagaggatgcaggagtcagattcaaaggaaggcccaaggtgctattgctgacttgaagatagaggggccatgtggaaatcaagagaaggaagtgaatccttccagtgagcttggaagaaagcaccttgaggcacagatgagaagcttggccttacctgatgccttgattttagcctggtgagaccctgagcatataaatttgctgtgctatgccacacttctcacctacagaaacttagtttaaagccactaagtttgtggtaatttgttggctttaggcccctgagggtagagatttatggcttgtgttacaagtagagagcagtggagagttgggctttgtaattctttcaagggtgattgtagttctggagtcctatctacctgggttcagatctttgttggccagtccctggctgtgtgacttcactgctttaagcctctgtcttcatccttaaagtggtgatgatagtacctacctcactctgatctctgaatgagaacacatgtaagacacttagcacagttctgtggtgctcaaagagttccaacacctgaaagcaccatggccctgtttgtttttcagtcaagatttctaaaagccgttattaccagaggttcagtgagaacatgggcagggtaaactcaaaatggagaacataaaaactgggactcccagaccagtcacttagaagactgctgcaggaagtaccaaggtcgttaagaatcagtaataataataagtaatgtgtgaatccattagaatgttgagaagtagacctttgacatttcagaaaaatgtatatctcagacacagccatatgtattgttatccctgagttggaagagcatcacagggcatagtttcacaaaagcttcaaaaaatatactaattgcnggtaatatgtgaactaacagaaaaaaatagccatgttaaaataggagtgcctgacaattagctctattcatcttgtctcctagctgtaagcaccctagattcaaattatgcacctagaaaactaaattactatgtatgttataggcctttgaaatggatacatgaaaattagtgaaatcagaatgaacgtttcgcctgccaaagatatgtatttttataagtgatacaagggccccatgagctccatggccacatctgtacaaaacaggccctcctttcaggaactggtctcgagagagcaaaggggtcaactccctaaatggcagctgagacagtcctccctggtggcatggccctgtttcctgttgatatggtgatagttggagagtcaaatttttaccagaatttgtgaatatcatctctggttaatgattacacaaaaccttttaaaattttaaaaaattatttctaattctataaataaactctgcagttgtacagccactgtacagctaacatctcaacactggaaatgaggctggtttcttccagtttggctcagattcttcagggaagcccagttaagacaaacagctctctatactcaatccttactttgctgagaagatacaggcctgcccactcgctcccacctgctcttcacgaggagtcctttattcctgcatgtttcctgttctttgggacctttaggagctaacctccacagatgctgatagtctgtagagtcaggaataccatgtaacatgttgaagtagactaaagattagttctttggcaatagcccagtctggacttactatgtacttttgaaaataaaactgcttatttgtaaactctgtaattaggaccttttgctatttgagttatattcctttctaacttcaaacgtctgcattcatgtataatagccattttatgcacagatgaggtgattcccacactttttttcgcagatgtttcattatctggatgagtgtattacataataaatttgaataatggtagtcttccaaatgacaaaaagcaagctagttgatttgtcaattttgagtttaaatgttttgactgcttatcagcaaaaaaaatcaaagaatagcatactaatattaatggaaatgcagagtatatttaattggcatgattttttcatggatgtgtgcttcatttgatctattgtatgtagctcgtgatcacattttctgttggttaacattgttcctagcttatatgatggaattaaatatattctgtgt

SEQ ID NO: 251 - DNA, 1973 bp, Homo sapiens
agaaaccttccctctcttttctacttttggtggaagtacagcctacacctaatgcagctgcctctctttactctgccactagacagccaacttctgctacaagaatgggctgccttccatttgcgtaggcataggccaactaccagcccttttagtccttccagctccaaggatccttcaacacttctctcacctaggaccaatgaatgagggaatgccgtagcagttcaatcagctttcttcaaacaagttccctgctttgttctcttcaacttcaatccttttattcaattaaggtggatgtcaaactgtgggactgaaaacaaggtttcagtcatctgcttttcatgtctagcacctcactgaaagtgaggggtgtatgccatctattgtcccttgttcttggctgaaatggaaacagaaagagtactattttagcacccttttccatgtacttggaagtggtgcagagaagacagaaaactagtttccaaattcaagatactgcaatagaccttgaatggaacgcaaagttatatgagatattttcccaatctttcagggacttggaatctcaaactggtagaaaacatgttcacaaaacacattcacagcaaaacaggttttgaaataaaagaagtgtacaatcccacagactttcaaataggggaaaattcttttttgattgagaggattcaacagtatttaatgaaagaggtaatatgtgatatgagttttcattcaattaaaataaattctttaaaatatggatgagatgagataatgactgagaatgctttaaaataattcagtgagtgggagaaagagggtcatattatatttgaagtgaagttttctgagtgagtaatcattgaagctgtttgatgggaacggagtgttatactatattttctgtatatttgtattcacttaaaattctgtaatacataaatacaaaaatatagtaacacaataaaaataactttgtcactgtctactctttcacaaacactgttctagatgctagggacacagtgatggacaaaatagacataagtccatctctcatgtagactaggatatagaagagaagaacacagaacaaatatttacaagtgggaatagtttacaaaatctttcaagttggatggaattttaatcagcagacttggaagcaagaaagcgagtgggagcaaatgcattcttgagtgaaatgctctgagttgagtggcctctacactgcattactttcatttgtgtacaaactttcagattatgttttctccttctcactattctctttcatttcagcttcatgggcatgtcgtgactatttagtattagaagccttctctcattcattataatgcaaccattcattcataaagccaataaggctcagtggttaggaacaggttcaggagccatgctactaaggttgtcaataaagattaaccacttaccagtgatgtgaattaagacatattcattaatctctaagtgcatcacttttcttaactttaaaatgtgggtaaggccgggcgcggtggctcatgcctgtaatcccagcgcttcgggaggctgaggtgggcagaacacgaggtcaggagttcgagaccagcctgaccaacatggtgaaaccctgtctctactaaaaatacaaaattaactgtgtgtggtggcacatgcctgtaatctcagctacttatgtggctgaggcaggaaaattgcttgaacccgggaggtggaggttgcagtgagccgagactgcaccactgcactccagcctgggtgacagagagagactttatctcaaaaaagaaaaaagtaggtgaaagtaatacctacctaatatttgaaaattaaatgagttattcacatgaacagtttagaatcctagatataacatagtcaataactgttaaatcatgttattgttaaataaaatatgctcatttacttcaatggaaatg

SEQ ID NO: 252 - DNA, 1423 bp, Homo sapiens
aaatctatccctgggttttctgaaaatcttacgtaaaaggtgtttaataatgatatactactttttttttcatatttgtttgtttgcaatgttactgtaatactatttgccattgtaaaaggccagctcagattgtgagccctttctattgggacagtcctcttctatatgttttaagtggccagtaatttaatgaatttctggtttgtattaaatatgtccttccaatggataagttctaaaacatacgctatcattggcccatgttgctgaggtgcattgtgaacaatacctttagtgactgtggaactgctgcttctatcagaagacctaggatacaagcagccactgtttcctccgttaacaatcagcttttagtaacctgctgtggtcagcatagctacaggaaaagtcagcccttgactgagggccagatcatccctggagtgcacctctactaagattttatgaaaagatgacatgttgggctgcatgataaaagttaattataaaaattaaaagatttttttttttgagatggaatattgctctgttgcccaggctggagtacagtggtcactgcaacctccatctccctggttcaagcaattctcctatgtcagcctcccaagtagctgggactatagtcacttgccaccatgcccggctaatttatttttagtagagatgaggtttcaccttgttggtcaggctggtctcaaactcctgacctcaggggatccacccgcctcggcctcccgaagtgctgggattataggcgtaagccaccatgcctggccaaaaattaaaagattttatgaaacgaaatggcttcccattctttctattcagcttctaagtgggctattcatttgtgctctcctcttttttgttttgttttgcactttgtcaatcatttggggaaatagcctggaggtctttcctgaatctgtttgtagacataataaaatttgtgtgctgtgtacacaaaaacataatgtatcttatgaaagcattacccaacctgtttgagttgagaatgcatttgtccacctttgatttgaggctttagtttgctgatttcctaaatgctaccctttgatcatttcctggccaccatcacaatactaaggggctcagatgtgtcttgtgcccacctcttcctgagaagagatggaagtggagctgtgactagtacaagcagcccaagaaactctgaacggggcccaatggaggcaaacttgagcaaataattgggatgataagaaacaaaaataatcccaactgtttgaaattcgaaagaggggcattcttttctggtacatggtgagagttcaggctccagagactcaaaacggaatggttttccttggcattttgtaaatgctctcacatctgtagcaataaagctgttattttctgc

SEQ ID NO: 253 - DNA, 2547 bp, Homo sapiens
cttccggcgtcatggctcaaagggccttcccgaatccttatgctgattataacaaatccctggccgaaggctactttgatgctgccgggaggctgactcctgagttctcacaacgcttgaccaataagattcgggagcttcttcagcaaatggagagaggcctgaaatcagcagaccctcgggatggcaccggttacactggctgggcaggtattgctgtgctttacttacatctttatgatgtatttggggaccctgcctacctacagttagcacatggctatgtaaagcaaagtctgaactgcttaaccaagcgctccatcaccttcctttgtggggatgcaggccccctggcagtggccgctgtgctatatcacaagatgaacaatgagaagcaggcagaagattgcatcacacggctaattcacctaaataagattgatcctcatgctccaaatgaaatgctctatgggcgaataggctacatctatgctcttctttttgtcaataagaactttggagtggaaaagattcctcaaagccatattcagcagatttgtgaaacaattttaacctctggagaaaacctagctaggaagagaaacttcacggcaaagtctccactgatgtatgaatggtaccaggaatattatgtaggggctgctcatggcctggctggaatttattactacctgatgcagcccagccttcaagtgagccaagggaagttacatagtttggtcaagcccagtgtagactacgtctgccagctgaaattcccttctggcaattaccctccatgtataggtgataatcgagatctgcttgtccattggtgccatggcgcccctggggtaatctacatgctcatccaggcctataaggtattcagagaggaaaagtatctctgtgatgcctatcagtgtgctgatgtgatctggcaatatgggttgctgaagaagggatatgggctgtgccacggttctgcagggaatgcctatgccttcctgacactctacaacctcacacaggacatgaagtacctgtatagggcctgtaagtttgctgaatggtgcttagagtatggagaacatggatgcagaacaccagacacccctttctctctctttgaaggaatggctggaacaatatatttcgtggctgacctgctagtccccacaaaagccaggttccctgcatttgaactctgaaaggatagcatgccacctgcaactcactgcatgaccctttctgtatattcaaacccaagctaagtgcttccgttgctttccaaggaaacaaagagtcaaactgtggacttgattttgttagcttttttcagaatttatctttcattcagttcccttccattatcatttacttttacttagaagtatccaaggaagtcttttaactttaatttccatttcttcctaaagggagagtgagtgatatgtacagtgttttgagattgtatacatatattccagaacttggaggaaatcttatttaagtttatgaatataaccatctgttactgttctaaaaatgtttaaaagaaactcaatacagataaagataaatatgtgactattattgggtattacacttcacttctctttaatatttttcctccaactggagggcagacaattttctgacttgcttttctctaggtggttcattttgaaaggggacagaaatataactaaatgcttccaggagaaaaattccaagagttacaatctggacttggtacctaaatatcattttttaaattcttgatgcctatttggactagaggtaaacatactttcagattggcctgtttttgtcggtaaggcatacagccttcagaagccaacatttttaatcaaaaacttataaaacatgatgatcattgtgaaaattctgagttgaaggttagtttaagataagctaacaataacagtctgtgttttctctaaaataatctgagttttttggaactctttatttaaatatgtgtgtttttcagtattcaaataagatcaggaagccaattttctatgtatgaatatgctttaacctaggatttcagtccactctgactgactttctaaactttaacttgggtttttacagtgactatgcattagtgctgactctttggtataagccataaaatattttccttcctatcaatttatctgaactttggtcttttcactaaattgtacagtattctacttctgtttaaaaaggggagatgagaaagggaatactatctaaccaataacttgaacaaaaacactaaactaagcatttaatagaaatgctttttattgaggaggtattatccagagttcatgcttagaacaaatgcatctttgcgtatcctagacttaacaattcatcagtttctgagaccacagaatcaggttttccgtagtagataaagactctctggtgcttcaaattctgttcaagtgttttgactcatcagcttctactctttctattactgcctttgcctggcttgttttgtctctttgcaactgattttgc

SEQ ID NO: 254 - DNA, 1742 bp, Homo sapiens
tgatacgaaaacgtcgctgctgaaggacatgaaagaatgtaatactagattctgagatgcaatttttttcatttcttcttcctgaaaaaccgttaggttgatgtgcattacagtgttacgattatgtatgagtctaaggaaaatcagatgaaatgtccaaattgaaccatgaaggtgcattggtagaggaagagacaattagggtcagtggaacaaagcacagttagagggagaagcaaggaggaggagggatcacggaggtggtgcctgtgtgtcccacaggaagcaaaagctgatgcccagttcccagcatacctaagtaaacttcaggtccactcccagcacgtttctcgtgatagtaaaactatgaaggaactcagtgtacaaggagcttctacaaaataggcagaagacagtagccagatgggccaagggccccagccacccacgcccctccctctccttgaagaccttcggttccaaccccaccatcagcagggctctgctcagttcctccttgtgtgtatcaccacagggctgctggctcgtgtcaccttcaccaccagaccccacatcaggagtcccgccaggggtgtggggaggcagcgctgcctggttggccgtggagccgtatggaacgtggtgcctcacaggcagtctgcttggcgtcctggaccctggctgtatcccgctggaaaggatgtgtgtgggtctaagatatgtatataatagaaacagttattcagaagctttagtcaaaacttcatttttaagttcagagtaataaactcatagtctaaatttcctaatttttctgtttaatttacataaataaaatgaaatgcaaaacaacaggtctaaaagttaagcagttcttggtatggctgcttctatgaattaaaagtttacaaataatattttgtgccacagtcaacgcaaaatcatgctgccgtgttccgtgtgggaagcttgttgcaagaaggttgtgggaaaatcagcaagctctatggagacctgaagcatctgaagacgtttgaccgaggaatggtctggaacacggacctggtggagaccctgaagctgcagaacctgatgctatgtgcgctgcagaccgtcaatggagcagaggcggggaaggagtcacggggcgcgcacaccagggaagactacaaggtgcggattgatgagtacgatcactccaagcccatccaggggcaacagaagaagccctttgaggtgcactggaggaagcacaccctgtcctatgtggacgtcggcactgggaaggtcactgtggaatatagacccataatcgacaaaactttgaacgaggctgactgtgccactgtccccccagccattcactcctactgatgagacaagatgcggtgatgacagaatcagctttttgcacagccagagaacaacacatcacacacaagaaacagttgtgctcatgtgatgggggcctcagcactaggaaggagtggactgttggcgcacgcagcagcttgaataaatctgaaagtcactacgctgcgtaagagaagccaaataaagcgcatgctgtgtacagagggtgtcgagaatgcctcctacgtgacggaaagcagatccgtggttccctgcagactggcaggagcagattccaaaggcacaggaagaagcttgcaggtagaatgtgttcattacctcctgcacattacaccacaaaaaagctgggaataaaaatgctaaccccc

SEQ ID NO: 255 - DNA, 2797 bp, Homo sapiens
gtgattattctggctgagatgtgttatttggtttcttccttcttgatcatttggtgtttaagtaaaatgaggcacaggcttgtttgccgagtggagtgggaaaggcattttgatttgctggcctaattaaaaaatgataaaggattaaaaggaaaaggtggacctggactgagggtgtaaaatccctggacacattcgtggggcaggaaaaagaagaggaagattagaagattttttttttctttgagagaaagcccagcggagataaacgaatgtcccctcatctccaaagaaaagttcatcggatttttattctagagagctcatcttcaggatgtcagtgaacatttctactgcaggaaaaggtgtggatccaaatacagttgatacttatgacagtggcgatgattgggaaatcggggttggaaatttaataattgatttggacgctgatttggagaaggacagacagaaatttgagatgaataattccaccaccaccactagtagcagcaactccaaggattgtggaggtccggcctccagtggggctggtgctaccgcagccttagctgatggcctgaaatttgcttctgttcaggcctctgctccccaggggaattcacacaaagagaccagcaaatcaaaagtgaaaaggagtaaaacttctaaggatgctaataaatctctgccttctgctgccttgtatgggattcccgagatcagcagcactggcaagaggcaggaagtccaagggcgccctggagaggcaactggcatgaattcagcgctgggtcaaagtgtgagcagcggcggcagcggcaacccaaacagcaatagtaccagcaccagcacctctgccgccaccgcgggggcaggctcctgtgggaaaagcaaagaggagaagccaggtaaaagccagagcagccgaggcgccaagcgggataaggatgcggggaaatccaggaaggacaagcacgacctgcttcagggccaccagaatggcagtggcagccaggccccttccggggggcacctctatggctttggggccaagagcaatggaggtggcgcgagccccttccactgcgggggcactgggagtggcagcgtccccgctgcaggggaagttagcaaaagtgccccggattcagggctcatgggaaactctatgttggtaaagaaggaagaggaggaggaggagagccacatgcgaatcaagaaactgaaaactgagaaggttgaccccctgtttacagtgccagcgccaccaccgccgatttccagcagtctcacgcctcagattctaccctcctacttttccccatcttcatccaatattgcagcaccggttgaacagcttttggttcggactcgttctgtgggtgtcaatacatgtgaagttggagtagtgacagagccagagtgtcttgggccctgtgaacctgggaccagtgtgaatttggaagggatcgtgtggcatgaaacagaagaaggtgtcctagtggtcaatgtcacgtggaggaacaaaacgtacgtgggaaccctactggactgcaccaagcacgactgggcccctcccaggttttgtgagtcaccgacaagtgacctggagatgagagggggccggggcagagggaagagagcaagttctgctgctgctgccccgggctccgaggccagcttcacagagtccagagggctgcagaataagaacagagggggggccaatgggaaagggaggcggggcagcctcaatgccagcggacgaaggacacccccaaattgtgctgctgaggatatcaaagccagcccttcctccaccaacaaaaggaaaaacaagcctccaatggagctggacctgaactccagctctgaggacaataagcctggaaagcgtgtccgcacaaattccagaagcactcccactacccctcaagggaaaccagagactacttttttggaccaaggctgctcttctccagtgttaatcgactgtccccacccaaactgcaacaaaaagtacaagcacattaacggcctgaggtaccaccaggctcatgcacacttagacccagaaaacaagctggagttcgagcctgacagtgaggacaagatctcggactgtgaggaaggattgagtaatgtggcacttgaatgcagtgagccaagcacaagtgtatctgcttatgaccagttgaaggcaccggcatcccctggtgctggaaacccacctgggaccccaaagggaaagagagaggtgatgagcaatggcccaggttccattattggtgctaaagctgggaagaattctggcaaaaagaagggccttaacaatgaactgaacaaccttccagtaatctccaacatgacggctgcgttagacagttgctcggcagcagacggcagtttggctgctgagatgcctaaactggaagcagaaggattaattgacaagaaaaatttaggagataaagaaaagggcaaaaaagctaccaactgcaaaacggacaaaaacctctctaaactgaaaagtgcccggcccattgcccctgccccagcccccactcccccgcagctaatcgctatacccactgcaacctttacaacgaccaccactgggacaatacccggactgccctccctcacaacaactgttgttcaggctacaccaaagagtcctccgttaaaacccattcaaccaaagcccacaattatgggagagcccatcaccgtgaacccagctctggtgtcactcaaagacaaaaagaaaaaggggaagcgaaagctaaaggac

SEQ ID NO: 256 - DNA, 1617 bp, Homo sapiens
tttttttttttttttgagacggagtctcgctctgtcgcccaggctggagtgcagtggtgcgatctcggctcactgcaagctctgcctcccgggttcacaccattctcctgcctcagcctcccgagtagctgggactgcaggcacccaccaccacgcccggctaattttttatatttttagtagagacggggtttcaccgtgttagccaggatggtctggatctcctgacctcgtgatctgcccacctcggccttccaaagtgctgggattacaggtgtgagccacagtgcccggccttgagttaatttttatataagtgtaaagtggggattcattgttttgcacgtggaaatccagttgtcccagcaccatttgttaaagatactattctttactcattgaattattttggcacccttgtcaaaaatcaattaaccattgtgtgaaggatttttccctggactctcaatttttgcatatgtactcataagaggttggtctgtagtttccttaggttgtttgtctgggtttggtatcagggtaatactgccctcagagaatgagttgttaccttttacttcaacctacttgtatcctgtcatatttaatgtgagttacttaaagacagcatataattaggtttttataatccaaactgataatatgtcgaattggcgtgatgaggccatttatgtttaatgcaactattgaaatgtttggctttagatctaccattatgttgttttctgtttgttccctgttttccattgctgtttcttctttccttttttccttccctcctatctctccttctccctatacacacacacacacacccccaacacacacacatagtggttgttctaggggttctaatacacatagtttttttgtgtttttttttttttttttttttttggagatggagtttcgctcttgtcgctcaggttggagtgcaatggcacaatctggctcactgcaacctccgcctcccgatttcaaacaattctcctgcctcagcctcccgagtagctgggattacaggcatgcaccaccacacctggctaattttgtatttttaatagagacagggttttgccatgttggtcaggctagtcccgaactcctgactttaggtgatccacccaccttggcctcccaaaatgctgggattacaggcatgagccaccctgcccggccaaatacacatactcttacagtcaatttagattaatgttttgccatttcaagtagcatgtagaaacctcactaccatctaggtcccttcacccttctcccctcatgttctagttgtcttacatctgtatacactgaagcctccatcagacagtatcatgacttaattcaaccatcacataacacttaaagaagtaaagaatagtttcatatttatgtggacttttgccatttatgatgttcttcctgcattcccaaagttttgaattgcccccagtaatctcttctgtctgaagaacttggtttaacatttttttaaagcagattctttggttatgaatttcctcagcttgccttcatttgagaatgtctttattttatttcattcttttattccagtaaaatagaaatttttactgg

SEQ ID NO: 257 - DNA, 1575 bp, Homo sapiens
ctggattcctgttgagatacaccagcacagcacttctttttttgagacggagtctccctctgtcgcccaggctagcatgcagtggtgcagtctcagctcactgcagtctgtctcccgagttcaagcaattctcctgcctcagccttccaagtagctaggattacaggtgcctgcaaccatgcccggctagtttttgtatatttagtagagacagggtttcaccatgttggccgggctggtctcgaactcctaacctcagatgatctacccacctcagccttccaaagtgttgggattactttggcgtgagcaccgtgcactgccataccaccacttgtaataaatatttcattctatatcgaatgccctctttgttcctatgtcatatacatgcagtagagctggaggaccatagcttatttaaaattatgcaaattgggccgggcgcaatggctcacgcctgtaatcctagcactttgggaggctgaggcaggcagatcacctgaggccaggagtttgagaccagccttgccaatgtggagaaaccccgtctctaccaaaatacaaaaattagccgggcgtggtggcacatgcctgtaatcccagctacttgggaggctgaggcaggggaatcgcttgaacccgggaggcagaggttgcagtgagctgagatcatgccactgcattccagcctggtgacagagcaagactcctttaaaaaaaaaaaaaagttttaacagtgataatagtacagttgtgtatcctctaggagctgtattccagaggtcacccagagcagtaacctaaaatgcttatttatttattctttgccccttaggatggtgaagaagacgaagtaagtgctggagaaaaggagcaagatagtgatgagagttatgatgactctgattagaccccagataaattgttgcctgcttctgtgtctctgccagcctgtgatcattttgtgttagagtttgaaatccgctgtttgcctttcttactggtaggatccttttttgttcctctttttttttttttttttttttttttaaagacggggactcgctgtgtttcccaggctggagtgcagtgctgcaatcttggctcactgcaacctccatctcctaggttcaagcgattctcctgcctcagcctcctgagtagctgggacgacaggcacatgccaccatgcccagctaatttttgtatttttagtagatacggggttttaccatgtcggccagatggtctcaatctcctgaactcatgatccacctgcctcagcctcccaaagtgctgggattacaggcatgagccaccgctcccagccatattttgttcttaaagtggggtctttattaacttgtggacatcatggattgtctaacaccatcacagtccctggctcaggattctaatgtagcattatttattggtttggataaacccagctgtgctacactgcagagtaaaatctctgagtcatgattctggactttgggagctagttttgaaactctgatttattgtagaacttaggcttgtaccaattttacaaataaattctgttct

SEQ ID NO: 258 - DNA, 3794 bp, Homo sapiens
  misc_feature 250: n = a,c,g, or t
ggcagagaattttgcaacacgtggtagtgaactgtgaggagtttgaggggtctgaagactgaaagagtcgaatggtttgttggcaggacctagaagaatcccttaggatgaagctgagtcttaccaaggtagttaatggctgtcgcctaggaaaaataaaaaacctgggcaaaacaggggaccacaccatggatattccaggctgccttctgtataccaagactggctccgccccacacctcacccatcncacgctgcataatatccacggggttcctgccatggctcagcttacgctgtcatccctagcagaacatcatgaagtcttgacagaatataaagaaggagttggaaagtttataggcatgccagaatcactcttgtactgctccctgcacgatccagtcagcccctgcccggctggttatgtaacaaacaagtctgtgtctgtgtggagtgttgcaggacgagtggaaatgactgtttccaagttcatggcaattcagaaggcccttcagccagactggttccagtgcctctccgatggagaagtatcttgtaaggaagcaacttccataaaaagggtcagaaagtctgttgaccgatcacttcttttcttggataactgtctgcggctgcaggaagagtcagagttcttcagaagagtgtgatcattggagtgattgaaggtggagatgtgatggaagagaggctgaggtcagcacgagagacagccaagcggcctgtgggtggcttccttctggatggttttcaaggaaatccaacaaccctggaggctagactacgcttgctgtcatcagtcactgcagagctgccggaggacaagccaaggctcatatctggtgttagtcggccagatgaggtgctcgagtgtattgaaagaggagtggacttatttgagagttttttcccttatcaagtaacagagcggggatgtgccctgactttcagttttgattaccagccgaatcctgaagagacactactacaacaaaatggaacacaagaagaaataaaatgtatggatcaaataaagaaaattgaaacaactggttgcaaccaagaaataacatcatttgaaattaatctgaaggaaaaaaagtaccaggaggactttaacccgctggtgagaggatgttcctgttactgctgtaagaatcacactcgggcatacatccaccatctgctggtgaccaatgagctgctggccggagtcctgcttatgatgcacaactttgaacactactttgggtttttccattacatccgggaagcactaaaaagtgacaaactggcacagttgaaagagctcatccacaggcaagcatcttgagatcttgcaaatacaagtctcactcttcacactgagcctgtaccactgttgtaacatgggaagacgtgaagaagaaataatctgagctttaattatttatatttggatataaggtctgcttaaataaagaatctttgtaccaaactgcccacatgagggtgaagagatttcctcaaaagacttaaatgacctggattgatcagagagaattgaactgtgacctttaaaacttctagactaattcttttagttgatagagattcatttagtcaaagacaaaagctttaactgtgagggcacagccttgaagtgggagtgatgagattctgagggacccatgaattggattgaggcttgaggggaaatggtgtgagacgaatgggctctggacatatgcctgttgatttgagaagaaatctggctggtttgagggtttcctttagttcaccctcatactctcaggagactcttctggatacttttgtcttccaccctgccctggcagtgcagccaatcagaaatggctcttgtgacttaactgggcttggatatccctggaatgtggggcttgaacattgctcctgtgatgatcatctgtcccaggtcacactccttcatttgaccacatggcctatttgcaacttctttttagagccaatgtaattgcctgttaggagccagaagtttgcccagctgctttcttctggttgtacagatccattgtggtctgccttccaggctcattaatagtctaactacgtaataactgaagacctatctcttgtgaagattcattctcaatgtgttcacttggacagagccctgcctggcctaacgattagagggttagtctccatcctgctcagatatgactcctgggcaattcacttaacttctccatggctgcttcctgctgaataaatagggacaggcataatggataggaatgaatgaacttttaagatactgtctagctctaaaattggaagaacaaaaagttttagattagagtcatagccttaatagccctagttgtcatcctgggagacaggcaacagtagagatatttgagagcctaaagagaggtttggcctgtgggtttttaagtggttattgaattggtatcaggagatcctgaggctggtaggggaaggtaattctttctaagttacctctgtatttttcaagttttctataaggaatacacatacacccacatgcacacaccatagtttttatacaaacagcaataacaaaaccaaaaagatgcccctttttttgtagggataagaaatacatttgttttatacttctatgctatattttgctattcaaaatttagtgggcattacttaacattgtttctaattattttgtggctgctgtatgttttatgtgttgggagcccattgtattaggccgttcttggattgctataaagaaatacctgagactgggtaatttggttttttggttttttggggttttttttgagacggagccttgctctgtcgcccaggctggagtgcagtggcgcgatctcggctctatgcaacctccacctcctgggttcatgccattctcctgcctcagcctcccgagtagctgggactacaggcgcccgccaccatgcctggctaattttttatatttttagtagagatggggtttcaccgtatgagccaggatggtctcgatctcctgacctcatgatccacaagactgggtaatctgtaaagaaaagaggtttaattggctcatggctctgcaggctttacaggaagcatggtactggcatctgcttggtttctggggaggcctccggaagcttatagtcatggcagaaggtgaagggggagcaggcacatcacatgacaaaagcaggaacaagactcagagcaagaagtcacttatcaccaaggggatggcccaggccattcatgagggatccacctttgtgctccaaacacctcccaccaggccccacctccagtattggggattacatttcaacttgaggtttgggcgggaacaaatagtcaaattatattacccatctacatggttttctttttcttagtatgggagtgtccatgaataaattcatgggcatcctcataactcttccatgaatggcaaggggtacttatggaaaacagttttccaaagatctgattgttttgaaatgtgttagattggacttgttcaaatgttcatatttttgttctatgctaaatgcatcgttaggggagtagtggtaaatattccagaatccatatgaaattcatgagtttatttatgtctaaaacactgaaaactgtgtccaatatcgttcagtttcctgggtctttttcttattagcacatttgagaaaaatattcctttcctttattgtagtaaatctattaaaggcaatagccaataaaacatttttaatttt

SEQ ID NO: 259 - DNA, 1969 bp, Homo sapiens
gaaagcacgactgtgtgatttgctttgagaatgaggttattgctgccctacttccatgtggccacaacctcttctgcatggaatgtgccaacaagatctgtgaaaagagaacgccatcatgtccagtttgccagacagctgttactcaggcaatccaaattcactcttaactatatatatatacataaatactatatctctatatggactcgtaaaggcatgggtataatggtaccccccagtaaacttcctaatgatttcttatgactgttatcaggctttattgggattaggctaaagttgttagtaaacttataaaaggctgctatggtaacactaaacctaagtggtctcttgtctattagtttggtttgaattattagtactatcctgtagacccagagacatagtttatataagaattgctaaagctgaagttcaacttggctgagtgaagataatcataggttgtgtgagcctatgaaaaagtgtatacgtctaagatttcaaaacaatgggtcccaaagcctaaccactttaagagtttatggagggtacttggcattacagacgattcatacacttccagtgctgccttctttacactgccagttttgacaaaacaggtttgttttttattttacaacaacatatgcctaattctgcaggattgcaagtaactttttaatgcattgtgattacttattggtaatgatagggctgatggcagtttactagatcactggttataatttgggacaaaaactgctacatcaactttcatctcgcccagagtgctcaaggctggtatgatcagtggatcaggaatgcaattgtgaattcctgcccattgcctctcttggtgaatgtggaaatggccacctgggttttcccatatcaggaagggctttgggatggcacctatattggctgataattgaggatgcaaacattccattcattagtgtgatcgagctgttaatttttagactatagatcaaaatgtgaaacattttatgttcaatccatatttgtcttgcacattataaatatatttttattttttagtaatttaggggagggaggagggagaaagggataatgatgcccttggcataattcacaaaagcagctgtgacaacctccaatcagtttacatcatttcaaaactatttccaatcacaaggaaagatttatttaaaatatactcgtacatttcacctgtggatgtctataacttcatcctcagtatgttcccaaatctgtgctggcattgaaaggacaaaacattatactagtgggtttttctactaattattttttgaagcattattttcccaacacaaaagagcttttttctcggtataatgaaaattgaaatcctatgtgtattcaatagtaaatagacaaattttattttttatttccacttgaagagttacatttcgtataaaagtttacaaataacggtttttattttgattttttcagtataaaaaaagttgccttgatggcatattatgatgtaatgctaattgcttgtaggatagtaaatggtcagtattgaaacctaatctctagctgccgtcttgtagatatgaacgaatgttcaccaagcatgtattttgtattttgttgcattgtacactgcaactaataagccaaggaatcgacatatattaggtgcgtgtactgtttctaaaaaccacaaactaagaatgataaattatcaatatagtttagtatttgctaattttactacactcttttgttatgtatatgtagggaagtcatagggattataaattcaatttgagtaaaatttaaaaccatatattttatgataaagggcctttaacttaagatggccaaagcactgatattatatatttgctgtaaagagaattataagagttttatttttcggatattaaaagttacttaataaagacttgtttccattaacttg

SEQ ID NO: 260 - DNA, 2581 bp, Homo sapiens
aatttttttcataacaatacttctccataaaagtaacctcggaaaacaatatgatgttgttagtttatttgcttgtcccaagtaaagtgaaggagttttttcaatacaattgtaaaaagaactcattctttcaaaagtatgtgcgctatataacatacatataacacaacatatttattaaaatacttactgtggctttaaaaacaaagtgcctagtggtcctcaaggttggggaagagtgccagtttgaaaagggaggatgctttgcttcattctgaaaacatgcatagggaataatcaggatatttatcaagttctgaatcagatcttcatagtatagcctctgtagttaaaaattatagtatatctaaattgcacaatagcacaattctcagttgcaaataaaaatcccaaagtgattagcaatattagctatgctactattcacttaagattgattttcatgattactcctcatgctgtctttcaaagctaaatgtcagaattagtcttagtctatatagcaacaggagtttttttttttacatagtttttctctacaacaaataaaatatgtagtatagttaatataaagattatgtaatggctattattctgtacccccaattaaggatcccattatattagtttcttaagtggaatcacccatattaacaagaaaatgaagcaagcacagcctgtattttggaaagatgaggaggtttacattaggaatatgcctaaccaaagttaatgtttttaatagctttattttcatttaggaattttttttttttttttttttttttttgagatggagtttcactcgttgcccaggctggaatgagatggcgtgatctcggctcaccgcaacctccgcctcccaggttcaagcgattctcctgcctcagcctcccgagtagctgggattacaggcatgcgccaccacgcccagctaattttgtatttttaatagagagagggtttctccatgttggtcaggctggttcgaacgcccgacctcaggtgatcgcccgcctcagcctcccaaagtactgggattacaggtgtgagccaccgtgcccagcctcaggattttttttattacagggtttccctctgtcacagataaaatctgcaatgtaattaatataaagcctatcaaatggccatctgtacctcaaaaaaagactgcagcttcttaaatggtctttccagagagcatgcatagtgcgcgaaaagtggctcatttaaatttttttgctatgttgggaggcctaataaccacatttgatttgagtctttagatggatttattttcgtttaaacatattatgcatttaatatacaaagttacaattttatgtgttctgttttaaacttttaaaatgtaggatgaagacactgtttgaagagatcaaagcatcaattaaaaataactataaccaagatcgatcattttgtaggcctgttcttccttgggggggtgtttttactatcaaagctggccgcaaagcagtatcctgtacaccactctatgttgaaataagactgaaaaatacctgcaccatagatggattcttgatgttattatatgtcattcttaatgaaaatgaaaacttccctagggaactctctcttcattttggtagagagtttgtagactgttttctttacttaatggacacctacagttttacaactgtgaagctactttggatttgggacaagatggaaaaacagcaatacaaatctgaagtccataaagcttcattaataattgatttgtttgggaatgagcatgataattttacaaaaaatcttgaaaatctcatgtctaccattcaagagagttactgttccaactggcgatgcccaactcgagtgcaggaggatcagcagcgcacaattaatataaatcctccccaagaaattccacatggaaacttgataagactggctgtgaatgagttattctgttccaagattgaactgtgtgaagagcatgggtgtggtggcttaagagaattttcccaacgaattttctgccatggggcacccccttttgttgtcttaaatatgcaacattggaaatctgaagatctggcgtatgtaccctattacttggatttgtctgatcacaagtatttgttggaaggtgccacattatttaacaaagaggaacatcattattctgcagctttccagattggtggacattggatgcactatgatgggctcagaaatgtgaatttaattttgttaaataaacccccagagtttctcctcttgtcatcattggtttatattcgagcaacagagaaataaatatagattgatgctaaaagttgttttccctcctgcccatgctctcccagatgaagggcttttattttgtgtatacttggtatccaagaaaatagttcaactatactagtttcagaagtgtattttcagtgtttaaccccaggtaaatgttttatatagaggatctgtgcaaaaatgtttgtaatttttttatatttcctgagttatttttatatgagcatattttatgttggaataaaatatatcttgtggc

SEQ ID NO: 261 - DNA, 2500 bp, Homo sapiens
  misc_feature 1477: n = a,c,g, or t
tttttttttttttttatatatacaacaaatttttaattatgtactgaaaataaattacaggaaataactttaaaatgcaacagaggacaaagtcacaataaacattcccattgaattcccttggtgggcggggggggggtgagattgcagtgctcaagataaatatcacaaatatatcaaaaacttcaaattgtctatgcattcacacactgacatgagccacaaacattcctttcacagggacagtacttatttagcctaccacaggaccagattttgccataaactacaaaacttttaatacaaaatcgtatttatatatttataagtcatatacatgccctatctgtgattttagaaaataaaagctacacactgtacagacactcttaactcatagctgtaggcaacatttttggatggaatttcttccccaataaaattaatggcatattttatatacatgaaggctaaactgcaaaaagacagttcagtttcccagatatgcatctccttttagggcaagtttataaatttaaaaaggcaagacaaatgtacacctcagaattactttcttagctacaagagttgccatgtaatttctgtgaagtttctgatacatgcattgatgtaatactggtattgaaggcagtaaagcaatatatacttttaatgtagtggctcaataaaggcttcattgtctttccaatctggttcttgaaacagtgattcataaattctctaaaaattaaaatttcaatgggacactgtgttaaagagactctaaatagatttctgaaaatatttccctgaaatatccttttacataagacaaattcactaacattagattaagtaaaaagaaataaaagagttaaacatggcacaaaggtgcatgattaaccaatgctcctcagtccatctgcatgtcttaggagccattaaaagaatgcttaaaactaacaaacaatcttcacactctgtggcagccatctgtgaagccagttacactaaactacttctacagttgattgtaaactttggtttatttttatttgagttctcattgtacagcaagcatgaaaaaaaaagagagtggagtccgtgaggagatgaactgtcagtctgtctttaatctggcatgatgagacacctggtcagtcaggcctgctttgatagagtttgttacagactgccttatgttttcctccatcaaattatcacccaggggcttcaatacctgttcccatagtgtttcagcaatctgatcaatcactgttccaatttctctgaactccccagagtatttaacatatgcccaagtacaaagaaatatcagtgctaaccccatgacaaggttacacaagacagctatagagtttaggccaatgaagccagtcagtcctgagattatatacatagcaaacatgaccgcaaacagtgtggctggggtacgagcagcatagaagatattttngccatcattgtgctttataaaatttgcataggtttcttcaatttcagcttcaagctggtcctgataacgacggcagaactcatctccacccatcttttttactgaacgaaattgttttatcgccacttccttgagatccaagtgttttcgctccagatctgaaggtgcaatgtaaggcttgtcccctccacatacctgttccatacttttacaataggtatctcttgctcctgctactgcagcaagattattagcttcagctgttgcctgaagcatggactttggatgtggaagttcttctccttgatagattttgatgtaagccttaaaatattctacaagatctctacaagtgactttagatccacttatctctttttctaccaaattttcaggggcaagcagcaatggaaccagatttcgaagctcgcgtttaaagtcttcatcaatatctttcaatctcccatcaaaactaggattagttgcaactttaagaccaggatgtggcaaaaggaagcaaccaagatttgagaaacaattgtgtatgtgcttcctaacattctgaagctcttcatgttgattttgttttacctgtaatctcttttcaagaaattgctttccaccttccaaaccatatgaatgttcataaggatagctccaatctcgaatcaaaaacattaatgtctgaaatggtttctggtagatttcttccatcgcaagtcttccatactctgtaaataattgcaaatgttgaagatcatcttcttgaatattctgagacagattatatacctggacagagctagtcatagtgctcagagcaaacaccgttgcacagtctttgatagttgactggctatcaaaggcaccctgggtatccataagcagcacagcaactttagttccattaggtctgtcaatcacaaatacttcattccaaactggtatgcctgttgtttctctttcacagccacctcgccatgtaaagcctgtcaatggttcattgtttattgaattagacca

SEQ ID NO: 262 - DNA, 815 bp, Homo sapiens
gcaaggaaaaggaagtgagttaaggacgtactcgtcttggtgagagcgtgagctgctgagatttgggagtctgcgctaggcccgcttggagttctgagccgatggaagagttcactcatgtttgcacccgcggtgatgcgtgcttttcgcaagaacaagactctcggctatggagtccccatgttgttgctgattgttggaggttcttttggtcttcgtgagttttctcaaatccgatatgatgctgtgaagagtaaaatggatcctgagcttgaaaaaaaactgaaagagaataaaatatctttagagtcggaatatgagggaagtatctgttgaagggctactatctttccttggcccttctcccttgttgggactcaatctccagactgtctccccagagaatcttgtcaaggcttggctttaagctttgttgggaaaatcaaagactccaagtttgatgactggaagaatattcgaggacccaggccttgggaagatcctgacctcctccaaggaagaaatccagaaagccttaagactaagacaacttgactctgctgattcttttttccttttttttttttttaaataaaaatactattaactggacttcctaatatatacttctatcaagtggaaaggaaattccaggcccatggaaacttggatatgggtaatttgatgacaaataatcttcactaaaggtcatgtacaggtttttatacttcccagctattccatctgtggatgaaagtaacaatgttggccacgtatattttacacctcgaaataaaaaatgtgaatactgctcc

SEQ ID NO: 263 - DNA, 1946 bp, Homo sapiens
  misc_feature 1549: n = a,c,g, or t
tttttttttttttttttgtcaaattctatgcaggatatcaaacagaaatttgaaaaattcttaaatgacatatacctattcattaacacccactgctctagatgacatccattagttattactgggatcagatgcttttaggacatctttaaaatattttgttattttaactgtagttctttatagcattacgaaagaaatatcactcacataaagcactaacaactctttttagtactgtgtctctcccatgcagtatggtgcttaatgttactggaaaatattgacaggtttagcattatttcaactaattctgggcaaatctaaatagaatagtataacatgaagaaatttataaatttgaaatgtgagtaaactgggacgggaatgagttgatgagtgaacccagttgaccactgggcatttgaatctcaatgttgcctacacagcattatgagtgtaataattttcattaggtaacaaaactgcttcctcacctttttatatagcttaaacaaaaaaaaagaaaaaagataaaaaaaaaccctgcttctatgtaaacaaaaaaaaagaaagccaactattagtgctaggaatgaaagacatccaatccaagtaagtgatggttcttaactataaaatggaaattgtataaaaattaaaatagaatgtagaactagtaggataacattgaaaaactgactacttatatttgtttttttttattttgtgtgtgtttttggctgattatatttaataaaagctacttttagtatttgaactaagtgcacatgtgtgcattcacatacacaggacaagctcctcagctttgaacaatatgaactttggacaatatgacaactatagcatcactgggcaaaaaaaatagctgacttatttccaagtgtgtttcctgggactagcactaggttctctcaaattaaaagtaaaggcaccaggctataaagtgccaattcttagcaccagaaagacttaaaatgtcacaggtgaatgacattacaaatcagagaatctgctgatctagttctgtggaattgtattatttttgtcaaatggaaaaaaaaaatcaaggtttatgccaaatagatttaaacagttaaatctttcctaaaatttcctagaagtgtattttacaatgctatgtaaaataaattgctggcttataaaaaatgctcaaagtttcagagatgtgaaaaataacaaagaactgaaaacatagtttatataaatcaaggtcccagaaatgaaaattaaaagtagtctctttgagaaaggaatggtgaaattcagcatgtagtattcacattaacacatctgagaactgtggacagccaatattgactggaattctaaattgccacctgatacctttaattaagattaaatcaaatctgaggcaagacacttaatggacagtacttgaatggggaagacagtaacttccttccttgatagacaatctccagccatcattcagagttcagttatttgatggcttgggaagcagtgtccattgagttttcctttngggcttgaagagactcactgctgatggacaataattctcgaagttcgttattttcaagctctaattgggctaatttttcctgaatcttacaaaactggtcatcatccacctgaactgctttcctcatcacttctcccatttcacagattctgtcaatctgactctcaatttctgcagagtgagactggtgagctttcaggactggttcagcatccaccgcttttttagcaaccattaactgtaacatctgtttccgatatttgctcatgataagttccaaagcatcctggtgttcctccaaggaaatccatagctctggtccggaagcgctgtccccgcctcccgcatagctgctacccgccggtgcagcgccgccgactgatccaccagcgactcg

SEQ ID NO: 264 - DNA, 1297 bp, Homo sapiens
  misc_feature 262: n = a,c,g, or t
ccattgggttattcttaagatgtgtttattgtaaagttttctacgttttgcccacagtaaatcctacaacttcgcaattgtaggatttaattgattgaattccaaatttatactgtctcttcccttctgcagagacattatgccactgtaaggtgcatgtacagaaaatacctctgaggttgacttgttaaataactgatgaatgttatttcacactgaatctcaaagcagtcatttgttttgcgggttaggggaaagtttngttttttgctggtgttttttgttgtttttaattaggcacactaagagtggctaaatttgggggaattggtggataggaaagaccttgaaaagtgatgtgtagatgaaaacacaaggtatggatgttggttacagagttcagttttaacaagggaaatttggggatttttttttttttacttgcatgttctatgggtagctatcaaagggtgtaacaaattattccagcttttcccaatactaattatattggttttaaaaagtctgcataatcactaggtggcattttcccttcatttgtgaaccaagaggggtaaatgatgctacccatacagtgacttctgagttctttaactttgacagaatctccattgtttcattgaatttctcattgtattatatgtctttccaagtgtgcaaactataatatgtagttaatgaaaaatggaaggctgcagattattttgcatgaataattaattgcccattagggctaaggagactgacatgatttttatcggttctgggtaaatgaaaattttaatggaaaactcattcaccatttactagctttgtgcaatattataaaaggtagaagcaaaacactagcacattgtgctttgcttggcttgtaaggatggctttagtaccattacattaaatggacagtgtgcacagtgtattgtaaatgccaactcttgcaaatttacaatacttaaatatgttcaattaacatcctaaagtattaaaagtacagaggaaaaactaagcaagcatttatagcaataccatgaaatctccagtaatcgttttgactgttgccttttgctctttagtgcagcttttctgcattgtaattgtattgctttgtatttcatgttttttacactcatgacttcagagttaagtacttgtacaccaagtattgcaatcacctttctcttgttgtacatgcaatgtaacaacctacagttttggtgcttttaacaatattcctctttttctttaataaaggatatttatttgaattaacctg

SEQ ID NO: 265 - DNA, 3004 bp, Homo sapiens
atgatgcgtccctgcctcggccgctgcagtcgccgccgccgccgccgcaggccgggaggagccgcagcgccgggcgaccccgcccgggcctcggatccgatcacataggacagtatgcaccttaagatcctgaagaaacggcacaaaatgttcaagtgatgtttagaaataacttgtgagggtgcgtcagggaaatcatgcagccatcaggacacaggctccgggacgtcgagcatcatcctctcctggctgaaaatgacaactatgactcttcatcgtcctcctcctccgaggctgacgtggctgaccgggtctggttcatccgtgacggctgcggcatgatctgtgctgtcatgacgtggcttctggtcgcctatgcagacttcgtggtgactttcgtcatgctgctgccttccaaagacttctggtactctgtggtcaacggggtcatctttaactgcttggccgtgcttgccctgtcatcccacctgagaaccatgctcaccgaccctggggcagtacccaaaggaaacgctacgaaagaatacatggagagcttgcagctgaagcccggggaagtcatctacaagtgccccaagtgctgctgtattaaacccgagcgcgcccaccactgcagtatttgcaaaagatgtattcggaaaatggatcatcactgcccgtgggtgaacaattgtgtaggagaaaagaatcaaagattttttgtgctcttcactatgtatatagctctgtcttcagtccatgctctgatcctttgtggatttcagttcatctcctgtgtccgagggcagtggactgaatgcagtgatttttcacctccgataactgtaatcctgttgatcttcctgtgccttgagggtcttctgtttttcactttcactgcagttatgtttggcacccaaatccactccatatgcaacgacgagacggagatcgagcgattgaaaagtgagaagcccacatgggagcggaggctgcgatgggaagggatgaagtccgtctttggggggcccccctcactcctctggatgaatccctttgtgggcttccgatttaggcgactgcccacgagacccagaaaaggtggcccggagttctcagtgtgaggcgtggctcatcagactgaaacttgctcacagacttccagttatttatttggggtctgaaggatatcaacagctcatctgtgaccaacagggcaactggaacctacacaaaccaattgcttgcagcaagcagagttttatatatttatagtcacagatggcagaggaagaggctctcagtccccacctgtacaacaacggaaaggtgtgtggccacacgaagaagccaaacgccgtggcctcctgcagagctggggcttctgtggagaatacttcgggttattacatgggttattcaaatcctgggtcctgagctgctgtttccaatcatgaagaaaaacagtgaatccagtgaacagggattctccaagcagtcatttcagggggctcctgctgaccccgccactcagcagtgcactccccggatcacagcagggcgtttacatagaaagacgttttggtctcgattagctccgatgctttgcactgaagttgcaaaagatctgtgcactgaacagtgaaggtggcttccggcacactccccgctgccccggaagagacatcctttgaccctctcagcaagtctgtgtgtgtgcgtgtctgtgcgtgtgcgcgcgtgtgtgcatgtgtgtcaaaattgccagtgttgtttaggcaatgtaacatttaccggctgtgtacagcaaacaagctattttttagaaaccgacgtttcagggaagaggggagagagccgcggggtcctgcccgtggttactatgaatgtattgctgttggaggacatctcgatccaaagaacagccgttcctgtgcggcccttcgttgccctcctgctttcattttttaaagaaatcttgagtgcttgagggccttggaactgattttttttttttgttccagccaaattagcagtgtataaatggcacctaggtaagagcagagctgcggctcggtgacttgatacttggggcagcccgatgctctgtgtggggcaggggaggcatccttactggagaggcagggcccagccattgggcacctctgggaaggggaggggaccatgaggcagccagcccctggcaggggcgactgtgccaccgcaggcagcgctccagtcgggaatggccaggatggcgccctcttgttggagtttttggttagcttttacgttttcttctccacccacggcacaggtgataaaataggatccttggtgcggagcttaaaattatgccagaaagccaacagctcccctcgtggggccttgccttaaacttgcctggtttgtacattttttgccggacgcatcaagaagcaatctgtgacaaagtctgagggtcttcctttatgcttgccctccacactaagagaagttggcgtctccctcctgggaattgttttgcctttctgttcatctgtgaactgttttttgtttttaattactctgtaccccatccgaatcagggcttctaccactgctgatgcaaaaccacaaagggacctacctgagccaccgtcctagccaagcgagcaaacctgcagggggtttggaagtggacttggtcaccgcagaagcgtgtgcgccgttgggggaagagctgcgtcacagccagagggacaaagtgtgggtgatcctggagacgccagtttccgagattgttctgcatattcatttgcacattgttgtctgggttggacatgcgtgtgggcttcagtgtgaggcttttaatatgtatatcctgttatcaataaaacaattatccaagtggttgaatcctgtgagacttggcaagtgtgtgcaaatcaagtatacttgacttttcaacctcttctttcaatgtaacttttatatgaaataaagtaatcaattaacagttctc

SEQ ID NO: 266 - DNA, 1863 bp, Homo sapiens
gctaaatcaactggatatgatccagttaaactttttaccaagctttttaaagatgacatcaggtatctgttgacaatggacaaactatggcggaaaaggaaacctccagttccgttggactgggctgaagtacaaagtcaaggagaagaaacgaatgcatcagatcaacagaatgaaccccagttaggcctgaaagaccagcaggttctagatgtaaagagctatgcacgtcttttttcaaagagcatcgagattttgagagttcatttagcagaaaagggggatggagctgagctcatatgggataaggatgacccatctgcaatggattttgtcacctctgctgcaaacctcaggatgcatattttcagtatgaatatgaagagtagatttgatatcaaatcaatggcagggaacattattcctgctattgctactactaatgcagtaattgctgggttgatagtattggaaggattgaagattttatcaggaaaaatagaccagtgcagaacaatttttttgaataaacaaccaaacccaagaaagaagcttcttgtgccttgtgcactggatcctcccaaccccaattgttatgtatgtgccagcaagccagaggtgactgtgcggctgaatgtccataaagtgactgttctcaccttacaagacaagatagtgaaagaaaaatttgctatggtagcaccagatgtccaaattgaagatgggaaaggaacaatcctaatatcttccgaagagggagagacggaagctaataatcacaagaagttgtcagaatttggaattagaaatggcagccggcttcaagcagatgacttcctccaggactatactttattgatcaacatccttcatagtgaagacctaggaaaggacgttgaatttgaagttgttggtgatgccccggaaaaagtggggcccaaacaagctgaagatgctgccaaaagcataaccaatggcagtgatgatggagctcagccctccacctccacagctcaagagcaagatgacgttctcatagttgattcggatgaagaagattcttcaaataatgccgacgtcagtgaagaagagagaagccgcaagaggaaattagatgagaaagagaatctcagtgcaaagaggtcacgtatagaacagaaggaagagcttgatgatgtcatagcattagattgaacagaaatgcctctaaacagaaccctcttactatttagtttatctgggcagaaccagattgttatgtcctttgttccaaagggaaaaaattgacagcagtgacttgaaaatgattctgctccctttgaaagcattcattttgctagaactgttagacacattgcagtatgctgtattgaaagtaggaatatagttttaaaaaccctttgaacaaagtgtgtgcataaccagtcatgagataaaacaacacaatgcatgttgcctttttaatgtaaatacccttaggtatcattaatagtttcaaaatattgtggtttagtaaagttgatacctggttataaatattatgcctttatttttggctagaagaagaattatttttagcctagatctaaccattttcatactcttaactgattgaaacagattcaaagaagtatcgagtgctatgcattgaaacttgtttttaaatgttagatggcactatgtatattaatgtaaaacaatgttaatttactcaagttttcagtttgtaccgcctggtatgtctgtgtaagaagccaatttttgtgtattgttacagtttcaggttatttatattcgatgttttgtaaaactcaaataacgactatacttatggaccaaataaatggcatctgcattcttgtt

SEQ ID NO: 267 - DNA, 2341 bp, Homo sapiens
aggggcaagagcttcctcctttgcctttggcatcatcttgtaaaaagagttctctacctttattaagtagttctcataagaggaaattcgtctcaaataatttgcctttgctttcttttcaattcctttctctctctctctctttttttttttttttttttttgagatggagtctcactctagcctgggtaacatttattactgcgtcaataaataaatagataaataaataaaattaaaatacgaaaataaaaaaattaggaccaggtgtggtggcatgcacccatagtcccagctactcagaaggctgaggcaggaggatcacttgacctgggaggttgaggctgcagagagctaggatagcaccaatgcactctagcctgggaaacagggtgagaacctgtctcaaaaaataaaatattttaaaaagcaggatgcaatattttatgcacactatgtgtatttatttgcccatactctttcagctggaagctatagaaacccaaatcaaattgacttctgcaaaaataacaaaaatcaagaaatttcttggctcacaggaacctgtaaagcctggaggaaagggtctacacagcaggtgctcatgacgctgtcagggattcggttctttctcttctctttgctccctttgtcattgatggctagattttcagggggatttcctccatgcggaggctgctagcgctccaggcatccttcctaacagctcaggccagttcaaagagatgctggtcccctgcggtttcggcaaatctcgggacaggctcgtgggctcctggcgtgtctcagaagcaattactacagcatcctgattgctcaggcctgggtcatgcaaccactcctgatgtggttgcgggggggtgcggccccaccctaacataaggcctgtggaaggtagtggaatcattcccaggaggaaaactggggtgctgttaccaaaagaaggtgaactgtgaactggatgctgggctggaaacataaactccactaaatgataatgacagacatgtgaaaaaaaaaaaaaaaaaaaaaaagctgctgcagtgcagcccgaccgcgagcgtgccaagcggcttcagcagctagcggagcggtggcggcggcccccttcaggacacaaccagattcccttcttccggcggctttgccatggcgacccacggacagacttgcgcgcgtccaatgtgtattcctccataatatgctgaccttggcaaagctgccagagatattttcaacaaaggatttggttttgggttggtgaaactggatgtgaaaacaaagtcttgcagtggcgtggaattttcaacgtccggttcatctaatacagacactggtaaagttactgggaccttggagaccaaatacaagtggtgtgagtatggtctgactttcacagaaaagtggaacactgataacactctgggaacagaaatcgcaattgaagaccagatttgtcaaggtttgaaactgacatttgatactaccttctcaccaaacacaggaaagaaaagtggtaaaatcaagtcttcttacaagagggagtgtataaaccttggttgtgatgttgactttgattttgctggacctgcaatccatggttcagctgtctttggttatgagggctggcttgctggctaccagatgacctttgacagtgccaaatcaaagctgacaaggaataactttgcagtgggctacaggactggggacttccagctacacactaatgtcaatgatggaacagaatttggaggatcaatttatcagaaagtttgtgaagatcttgacacttcagtaaaccttgcttggacatcaggtaccaactgcactcgttttggcattgcagctaaatatcagttggatcccactgcttccatttctgcaaaagtcaacaactctagcttaattggagtaggctatactcagactctgaggcctggtgtgaagcttacactctctgctctggtagatgggaagagcattaatgctggaggccacaaggttgggctcgccctggagttggaggcttaatccagctgaaagaaacctttgggaatggatatcagaagatttggccttaatatatttccattgtgaccagcagcaggcttttttcccccaagaagatgatcaaaacaaaggatgatctcaacaagagctgtattttaagtatttagacagttctttgttagctggtttctagttggttatctagttaccaatgctgcagtcctgcagtcacctatacattatttaaatgtatttaactgttaaatgcgctacccaccaataatgaaatagacctttatgaaaactg

SEQ ID NO: 268 - DNA, 507 bp, Homo sapiens
agcaaaaactccgactcaaaaaaaaagtgtctatctaccttctgctttattttgttttatatgacattgatgatgtccatctatgttggcccatataattcttaattattttaaatgctgtttagcattgtactatataaaaatatcaaaacacagctcccttttgttcatgaatccggaaggcagaggttgcagtgagccgagattgtgccactgcactccagcctgggcaataagagtgaaactctgtctcaaaaaaaaaaaaaaaaaaaaaaaaaaagttaacaaaacgttcttctctagttctaaagcaccaacacagaggtgatcaaaatactctaagaagcactgggaaacattgaggggatggttcaaacatcagagctaaggcctaatttcccaacagtcattatttctgtggtattttgcatattagagacgtataggttcctcacctaatccttgttttttcattttatttttaatacatatgaaagtcataataac

SEQ ID NO: 269 - DNA, 2472 bp, Homo sapiens
tttttttttttttttttttttttttttttttttttttttttttttttttttttttttttttttttttttttttctcaattgccaacagactagtttatttgtttctcttgtaatacgaacatgctattctcttagtttttatcttcaataacatatgaaagatccaaaatcaaattggctgtctctacagccacctgtaggccactaagctttgcagtcaaacagtccaaggtcaggttgctggctgagcccacagcttcatgtggaaggcagctttgtggcacaaatggacgacgtgtgcttcttaagaaagaccagttgagttcttcctggctattgtataatccacagccacactgtgaaagcaaatctggccagttagcaacacagggagaatctgcctgaactgaccaaaggtgtccatacttcatgtcagtgagaatttcacctccatcatgttctaaagagccaacaacagattctagggcactgcaaaatgcttcagcaattaattgaagttctgtttgagtacattcatcatctttgagaatgctttctgggtcgttgtgagtcttgtgtctgatatatgcagccaaatgagtttcagtacagccacctcccaacaaagcccatggttccttgagtgttaactgcaggacatgcagtgccgtctgacacgtgagcttcagctcatcccaggcagtgtcatttctgttgcagagaagcaagctgcagattgttgcttcattaggaataagatgaaaaaaatgtttggagccaaattttgcagtgcacacatctttcacacttccataactattaggacatattgagcctagggatccaataggctgtgttcctgtcattttagtcaggggttccatcagagtcactccaattctgtctatggcaataatacgatgcatattgagaaactgcttcaaagatggatgtataactttttggcacaggacaagatctacgtggtcactgattagctgccttcctaggttaagcagctggtccaagactgcattttcaagagaaaccccataactgaccaccacagttccttctccagtgtcagaagtgtctccggataaagttgtacaaaagagtgccaccttgagggcagttgattttttgataggtaatagcctcattaattgaacttctgacatttcaatgagtatcccaggtaatacagtggaatctataactctttgaccttttaaaggtacaattaaactctttcctaaaatgatgtggccttcagcattttctggaattgtaagcaaaaaggctctcaggatcaaagcactgacatgctctgtttcctttctggtgagcatacaggcaggtttacttgttaatatactacgcaccaaacaaaggaggatctgagtactactaaagtccactgggattcgacaaccacaggtctcagacttgagataactgatgcaaagactcaaaagatgtttatttaatctaatgacagtggtgggtgtcaagcctaatctctgaacattttcaatcaggttgcagcaaagaatagctgtgaataagccacaatcactgaagcttgacacatgattctgtatggaggctgtcaggatctttaaaatgggatgtgtgaccaaaaggtgactgagcagagctgaggactgtgaggttgtacacacgtaacctccaaagccattgtgcagctgcttcagcctacctgaggggccatagcatgatgttacaattcttttcaagacagaaagtgtggtcctgactctctcagttgtcagtggttcactcttacacaatgatggcttcttagcttccaaacgagacatcttacttcaggtggtaactagtgaagaccgtttttattttgtaaaccacatttttctatttattgcattatcacgttttaacattaaaaattattctttaggaattaaagtatgaatatgcagcattgtggctataaaatcaaaaagttcaatgtttatgaagctaatcagcatagaatgatttaatgacaaattagtaattccaaatatttattttacttcactcttcaatactcttttgtttgctttgagactgaaattttacagactgctttgcagacctctgcaaaaagtatgttccaagatggacacctatgaaagatatcccagctacaagaagccagttctttctaatccaactggtatttttcatctcttctttcgatatgaagctcagattcaaagctgcttctttacctgaagattgcaagcctgctacttcccctggatttggctcttctgaagatttgaaagtcccagactatcttgctcaggaatgtcgtcgtttttaggtatttggaaaacagggctgcttttgattctgtaccaccccaaatgtatgagcccaactaaagggaccataacaaccaaaactttgtagtctctccacaagttccgaaggctcata

SEQ ID NO: 270 - DNA, 2854 bp, Homo sapiens
  misc_feature 1813: n = a,c,g, or t
caacagacccgggatgttctgagggatcaggtccagaaactggaagagcgtctaactgatactgaggctgagaagagccaggtccacacagagttgcaggatctgcagagacagctctcccagaatcaggaagagaaatccaagtgggaaggaaagcagaactccctagaatctgagctgatggaactacatgaaactatggcatccttacagagtcgcctgcggagagcagagctacagcgaatggaagcccagggtgagcgagagttacttcaggcagccaaggagaacctgacagcccaggtggaacacctgcaagcagctgtcgtagaagccagggctcaggcaagtgctgctggcatcctggaagaagacctgagaacggctcgctcagcactgaagctgaaaaatgaggaagtagagagtgagcgtgagagagcccaggctctgcaagagcagggcgaactgaaggtggcccaagggaaggctctgcaagagaatttggccctcctgacccagaccctagctgaaagagaagaggaggtggagactctgcggggacaaatccaggaactggagaagcaacgggaaatgcagaaggctgctttggaattgctgtctctggacctgaagaagaggaaccaagaggtagatctgcagcaagaacagattcaggagctagagaagtgtaggtctgttttagagcatctgcccatggccgtccaggagcgagagcagaagctgactgtgcagagggagcagatcagagagctcgagaaggatcgggagactcagaggaacgtcttggagcatcagcttctagaacttgagaagaaagaccaaatgattgagtcccagagaggacaggttcaggacctgaaaaagcagttggttactctggaatgcctggccctggaactggaggaaaaccatcacaagatggagtgccagcaaaaactgatcaaggagctggagggccagagggaaacccagagagtggctttgacccaccttacgctggacctagaagaaaggagccaggagctgcaggcacaaagcagccagatccatgacctggagagccacagcaccgttctggcaagagagccgcaggtctagaattcaatcgggagcgagcgtggacctgggacgggtctgggcggctctcggtggttggcacgggttcgcacacccattcaagcggcaggacgcacttgtcttagcagttctcgctgaccgcgctagctgcggcttctacgctccggcactctgagttcatcagcaaacgccctggcgtctgtcctcaccatgcctagcctttgggaccgcttctcgtcgtcgtccacctcctcttcgccctcgtccttgccccgaactcccaccccagatcggccgccgcgctcagcctgggggtcggcgacccgggaggaggggtttgaccgctccacgagcctggagagctcggactgcgagtccctggacagcagcaacagtggcttcgggccggaggaagacacggcttacctggatggggtgtcgttgcccgacttcgagctgctcagtgaccctgaggatgaacacttgtgtgccaacctgatgcagctgctgcaggagagcctggcccaggcgcggctgggctctcgacgccctgcgcgcctgctgatgcctagccagttggtaagccaggtgggcaaagaactactgcgcctggcctacagcgagccgtgcggcctgcggggggcgctgctggacgtctgcgtggagcagggcaagagctgccacagcgtgggccagctggcactcgaccccagcntggtgcccaccttccagctgaccctcgtgctgcgcctggactcacgactctggcccaagatccaggggctgtttagctccgccaactctcccttcctccctggcttcagccagtccctgacgctgagcactggcttccgagtcatcaagaagaagctgtacagctcggaacagctgctcattgaggagtgttgaacttcaacctgagggggccgacagtgccctccaagacagagacgactgaacttttggggtggagactagaggcaggagctgagggactgattcctgtggttggaaaactgaggcagccacctaaggtggaggtgggggaatagtgtttcccaggaagctcattgagttgtgtgcgggtggctgtgcattggggacacatacccctcagtactgtagcatgaaacaaaggcttaggggccaacaaggcttccagctggatgtgtgtgtagcatgtaccttattatttttgttactgacagttaacagtggtgtgacatccagagagcagctgggctgctcccgccccagcccggcccagggtgaaggaagaggcacgtgctcctcagagcagccggagggaggggggaggtcggaggtcgtggaggtggtttgtgtatcttactggtctgaagggaccaagtgtgtttgttgtttgttttgtatcttgtttttctgatcggagcatcactactgacctgttgtaggcagctatcttacagacgcatgaatgtaagagtaggaaggggtgggtgtcagggatcacttgggatctttgacacttgaaaaattacacctggcagctgcgtttaagccttcccccatcgtgtactgcagagttgagctggcaggggaggggctgagagggtgggggctggaacccctccccgggaggagtgccatctgggtcttccatctagaactgtttacatgaagataagatactcactgttcatgaatacacttgatgttcaagtattaagacctatgcaatattttttacttttctaataaacatgtttgttaaaac

SEQ ID NO: 271 - DNA, 2528 bp, Homo sapiens
gttcttcatgatatttgagtggtgtttattgttacaagaaaagtgtgaaaaggatatactgttagattgaccatatagttgggattctttgtttggaagagaatatatatatttaattctagcttccttatataataatagatatatttgcccgtttaatttttataaatatcaaatactttaaatggattgggaagtacgcttttcgaaggaacccttcatttgttcattcattcatttattcattgagtaaatatttactgattaccagatgccagacatcgttctgggtatttggaacatattaatgaagaaaacaaagatctggctttgtggagcttgcattcattctagtgacatattaagtaaattgtgtagtgtgtattaggtgataagtgctatttttttaaaaagagaccatcaaacaggataaagaggattgggaatagggcagagagtggtagaggacaaattgctaagtaattgagtggttaaaggaaagctttattgaaaatgtgattcttaggcagaggtttgaaggaggtgagggggaaactgtgcatgtagacattttggggagaaagcttccagcagagagaacaaatatgcaaatcctctgaattattctgtatttaaatccagaacttggtctcatcagttttttaataacttagaaacttaagtgttagttggttgatggagttactagtagaccatgttgggagctgacaacaatttgagacctttattcttagccctttatgtctaaatttccactgaccaattgagttaacaataatttaggccatggtttacagtatcccaacttatgtacaaagatttctactcaaaagtcagtatagtgtgagagtcgaaataagttttctggtgattcaaacaccagttcccctttgtaagatttcctaatcatagagataatctaagaaaccaaattagtgtggaatctttgcagagagagaatgatttgatgaatcaggcaggggacggagaaagaatgctagaatcctaggggaatgcacatgccagtaccccagtcagtattactctccaattctgtagaatccacagttgcatgtcattgttcaacatgcattgcaatgtgtgggccaagtttgctacttatcaactaaatgcattttatagtacttaccatgttttgatttttttttttaatcacatcagtaatgtgtctccaaatgactttgtaagggggctatttattggccattttcaaaaacaaatctcacctgaaatcatctgctagagtctttctggaacctttttttaaaagtagactttattttttagatcagtttcaggttcacgtaaaattaagtggaaagctcagtgagttcccatataccaccttccatacacacacagcccacttccatcctcagcatcccatagtagagtgatcatgtgttacagtccataaccctgtgcacacatcatcatcacccaaagtccataatttagggttctctcttggtgttacacattttgtggattttggatgatgtgtgcagaactaatttttaaatattcaggattatacagctatatgccaggaatgtagtaggtgttatactaataaagcgtagttgtgtttttttgcattttaaaataaattttaaataaatatttagaaaccttttatattgtaaaatctattatttttacaagttttttctttgttcttttcttttagaaaataaacagagttgtctttgttggaaactttttacgtgtcaataccctctcaatgaaacttttggcatatgcactggattactggtcaaaaggtcaactaaaagcattgtttctagaacatgagggttactttggagcagttggtgcacttcttgggctgccaaatttcagctaaagcatcaggtctctctctctgctaataaatgtcatccaagaggaactaaaaccagaggcattattactgcattgtttgtcactgggaaccaaaggataaaagagtagcataagctgctgaatgttgccatattaaaggagagaacttggtaacgtgaagtatttctcattgaaatgctttcccttttgtatatagccagtgttaaatccttaaatgcaatacagcctctgattattgagcttcctcttaaaaagatttttttattttatgtagccaacattgcagtactgtatgctcaaacacaaatcttaaagtatcggaactgtttagcttatgaaaataatcgactctgaatatttgttacaagtctgttttatgtgttttgattactagtgagcagaaaataacataccctgtattcaaaattactgaaatggcaatcaaagatgatcatttttatgtgattttagaaatgttaaggcaatactactaattattgtaggtttttttaacgtatcacccaaagcatgtatgtgatctttccccattagtatctttttctcaaatgccataattaactgaaatactattattaaattttcatgagaattctaaaatg

SEQ ID NO: 272 - DNA, 3427 bp, Homo sapiens
ggaagactccagcccaagagaaagcagtgggaagcaaaattttgaaaccttgataaaggtggctttggctttgaggcctgcaattatgttttaggggaaggagggatgtctgaatggaatgcagaccccaaaatggctaaagtgtcatggtttcaatttctttctgccgaaggcaagcaccttctcatgctgatctgttgagttaggcttattcatgatcctgggaaacccagagtccaccttgagtgcacccctgatcctgggagacccagagcccaacttgagtgcacccctgcttaccattccagcctttcctctcctcacttctgccagaattatgaagctacttgccattgttatagattaacttgtgtctcccaaattcacatgtcaaagccctagcttcctatatgactatatttggaaatgggtccataaaggaaataatgaaggttaaatgagttcataagggtgggactctagtccaataggactggtgttcttataagaaaaggaagagacaccagacccctctctctcttcatgtatacggaggaaaggccatgcaaagacacactgagaaagcacagctctctgcaagccaggaaacagcccttgccagaagcaaaccctgttagcactctgctcttgaactagccttcagaactatgagaaaataaatatctgttgtttaagccacccagttggtggtattatgttatggcagcctgagctaagtttatattctcagagtaatccctatgcttcaggccatatgccagttgcttcttttgtttggaatgccttttctgaggatcatttgatcgatcacccccttgaggatcaaatgatcctcaggtcaagttcctgaaaggcaccctggatttttctagattgaaagggtatccttgcttagtgcttacttagcacctcatgacccttctcttgtaatgttgaacccattgttttgaaaatgtggcgttgcctgatttgacccttaactaagctttaaataccttgaggccctaaactcagacttacatcttggtgtttgtagaacccaccaacccaccttagtatacgtcagggactcagatgtcatcactgctcatagagtagattgactgatggatgggtgaaatgaattggtaagtaaacaaagactagatggatggatagacaagtggctggctggatgggtagacgggtggatgaatggatagttggatgaatcggtggatgagtggatggatagatgaataaatggatgggtaggtggatgggtgcatgaatggatagatggatggaaggatggatggatagatggatggaaggatggatggatagattaatggatggatgattagatgcgtagtcgtctaaaagcctgttgcctttcctagttcagagctcccaggaagtacacaggataggaaggggtggaggttgaggcaccagagtattcttccctaatgtaccatgttctcttcatcaaacctttataactaaaatgtctttacttgttccctttagtgcccgtgcccactggctgctgaatctttacagcattgaatagatattcttagatctttgtctagaagcactctggtcactttatttattttggatgttgtcacatcccattgttgggctaatttctattcaaagtagagtctgcagaataatatgaaatagcagtaactatgaatcaagaacttcaacaaatgaccgtctcatttaattcttacaaaaaaatacctcaaaactggtattattaacctcatgttatagctgaaagccatgaggcacagccaattgagggcaaagacaggattcaaattgtgtgtctgcagccctagtccaaaatcgcaagatgaatgagcagctctgctgccctgtgccttcttgaaagatggacatcagtgctatctggaattgcacctgcattttctgcaagaagaattaggctgggagacatatttctctttgaaatagtttcactagggacatttcctactgtgctgaaagctgacctcttggacaaacacactgtcataaaatcatgctatttgctacaagtgcattgggagttttaaatcatcaaactaaagtaccccaggctctgacagtaaaattttcattcaaagaaggactcagcttcacaacataataaattatatatgactgggacatataaaacatttaaaggtatacagaatttctctgcatttgtgttcagtgagtgagttcagctcttgaagtacttttttatgtcaatcctgcctattcataagaagaaaataggcccctttttctttctctgcaaatgagaaccacaaaacaagttgccttcatcccatgttctaaagttcagattttatatttggttttttctcttttttctccaagaatgtgctgggtgaggcaatgacacagtgatagcaggactgcaagtgcagcctgtgttgacctctgaaacctgagtaattaaacatcagagacacccaccagagagactggagggggccaaccaagacatgttaggatttggattgggggctataggtaaagagcgaagctcatacaaataaaagctgtaattaccaggaaccactttttaaagggtgctgagtttagagagacatgtattaaaatgattgaaacattgcattccaagatacaaggtgacaagcactatcctggcacatggtaggcaataaatgacaagatatcttgtctttctggacagaaagatggtcctagcataatgctaatacactagtgtgtatttgtcagcaattgctgtgttaatgctatataacaaactaccctccaaatcagtggcttgcaacaacaaacatgttcatgtttatgagtcatctgctatttgactgagctaggctggggtctttcctgagtggctctaaagcaggatcatgagcagctggacttgcctctagactgaggattgtgttcaataccatgctgtgtgtttcttccttctctttggactggagccattagaggcatgctctgctcttggtgaatggcaggaatccaagagtcaacaaaaacaggcaatgccttagggggccttggttcaaaactggctcactgtccttctaactaattccactggcccaagcaagtcatatgcccaacactgatattagtggggcagaggaatatcacatctgtgagtggtcttaaaagtcacgtggccaaaggcatgaatatataattcaaatacaactagagtatgaagaattgcaaacacttttatctacctctcctggctttcctgatcctaatctgctgcaaaactttgagtaaaaccatctctgtctccaattccagcagcaatcaaagtgtggccctgatcaacagcaccagcctcaccttggaatttattaaatatgcaaatgtc

SEQ ID NO: 273 - DNA, 3355 bp, Homo sapiens
  misc_feature 448: n = a,c,g, or t
caggcatgcgccaccatgcctggctaattttgtatttttagtagagacagggtttctccatgttagtcaggcaggtctcgaactcctgacctcaggtgatccgcccacctcggcctcctacagtgctgggattacaggcgtgagctaccgcacctggccgcctgtacattttttttacacatgttctgtactctaatatagaaccatggagttctcccctacaggtaggtttgtgtcataatcaactgataagatatgttaaataattttttttactgagaataatgaaagtatacacaatttttttctcttgttccagctttcttctgtgagaaaaaaaaatctgtttagagtaataaattattttatattaaaggctatacctgtaacctcattattgcttgttttctgctgtccttgagtggaggagaaggaggtaattatggcnggtggtcttattccttgttcacataacagtgtggtgtatatatgaaaaagaaaaagtgtggtttatatgataataaatcagtcctggtgtggaggtaggaaaaataattgagagtctctgttttaatatatgctttgggaataggaatgtaaaagtagacatgatgtcccagtttgagaataggattggaggtggttcttcgcatgtggtcttcatctgttggtctacatggcgtaaataataatttaaagctcttttttttttccagggaatgctggcagactttgtgtcccagacttctccaatgatcccctccattgttgtgcattgtgtaaatgagattgagcaaagaggtctgactgaggtaagagtcaactgtaggagatggtgaatttgttatttgtgttaattcggaggtttttaaataaaaatgtcatcttgataatagacaggcctgtataggatctctggctgtgaccgcacagtaaaagagctgaaagagaaattcctcagagtgaaaactgtacccctcctcagcaaagtggatgatatccatgctatctgtagccttctaaaagactttcttcgaaacctcaaagaacctcttctgacctttcgccttaacagagcctttatggaagcagcaggtaagggcagatgtaatacttgaatatgaattcctccacggcagtagtttttcttactctctttatttttttatttattttttattttttagacagagtctcactctcgcccaggctgaagtcagtggcgcaatctcagctcactgcaacctccgtctcccaggttgaagcgattctcctgcctcagcctcctgagtagctaggattacaggcgtgtgccaccatgcctggttaatgttttctatctttagtagagatggggtttcaccatgttagccaggatggtctcgatctcctgccctgtgatttgcctgcctcggcctcccaaagtgctgcgattacaggcgtgagccaccgtgcccagcctcttttttttttttttttaagacggagtctttctctgtcgcccaggctggagtgcagtggcgctatcggctcactgcaaactccgcctcctgggttcaagcgattctcctgcctcagcctcctgagtagctgagattacaggcgttaacggtgttataccatgttagccaggctggtctcaaactcctgacctcaggtgatctacccaccttgtcctcccaaagtgctgggattacaggcatgagccaccacacctggccaccttcctctttttattagctcctgcctagtacaatgcctgaaacatagtaggtgctcaagtagtttgatggatgagtaactgtatgcgtgtcacccttgcctatcctcttgctttctcattacgttattgtgtacagtgttcttcctttctttccttcctctccagttaggttggagctttttcaattcttagaatataccaagtttactccctaccttaaggccttcacatttgttgtctcaacctgaatgctcttacattagatacagtatggtttgctcctttatttctttcatatttctcttcatataccttgtccccagaaacacctttcctgacaaccttgtctagattaacagctctcatttctttctagcttcttgcctgccttgttttcttcatttatgtatcactctacctgataggtatttgctttttgactgactccaccaatagaatgtaggttccataagataagggctttgtttacttctgctttatcctcagcacttgtacctggcacatcgtaggcccttaaatatgtctcatgaatgaataccttcttggtaattgtagtcactgcaattgtatgcctgtctgcctagcacatcagttgccaactgctttccctaactgcaaaggccgattttttaaaagttttgacttctaatattgagctgttggccagtatcctgcttgttaatgaaactagagtctgatgtagtcatgaactaatcaggagtttcagaagcttactgtatagatgagactttgtggtcgataacttggaagcccgctgtcaagggaaagaagtctaggcctcttggtgctttcttttcaattacagaaatcacagatgaagacaacagcatagctgccatgtaccaagctgttggtgaactgccccaggccaacagggacacattagctttcctcatgattcacttgcagaggtgagtacagcagaaacttgttctgggagttagggaattttttttccaaggggaagataatgtgggttgagtgtttgggagtatgagggatgaattgttttcttatagaatttatattttggtctgcatttaagcaaggagcaagacttctaatttaatattcttttgcttagagtggctcagagtccacatactaaaatggatgttgccaatctggctaaagtctttggccctacaatagtggcccatgctgtgcccaatccagacccagtgacaatgttacaggacatcaagcgtcaacccaaggtaggcaggtgcatgtgtgtgtgtatgtgaacttgtgtaatgtgataacttgaaagacagttgagaagccgtgagctttggaagtttgctaacagatttgctggcttttaggtggttgagcgcctgctttccttgcctctggagtattggagtcagttcatgatggtggagcaagagaacattgaccccctacatgtcattgaaaactcaaatgccttttccacaccacagacaccagatattaaaggtaaggcccaagatgtgcttcttcagggacttgactctctctttagttttagtcatatgacctcttcctgcctttgctagagctgtttgaaaattctaacattaaaggaaaatttgtataattccc

SEQ ID NO: 274 - DNA, 1339 bp, Homo sapiens
aatcgggagccgggtggatggtactgctgcatccgggtgtctggaggctgtggccgttttgttttcttggctaaaatcgggggagtgaggcgggccggcgcggcgcgacaccgggctccggaaccactgcacgacggggctggactgacctgaaaaaaatgtctggatttctagagggcttgagatgctcagaatgcattgactggggggaaaagcgcaatactattgcttccattgctgctggtgtactattttttacaggctggtggattatcatagatgcagctgttatttatcccaccatgaaagatttcaaccactcataccatgcctgtggtgttatagcaaccatagccttcctaatgattaatgcagtatcgaatggacaagtccgaggtgatagttacagtgaaggttgtctgggtcaaacaggtgctcgcatttggcttttcgttggtttcatgttggcctttggatctctgattgcatctatgtggattctttttggaggttatgttgctaaagaaaaagacatagtataccctggaattgctgtatttttccagaatgccttcatcttttttggagggctggtttttaagtttggccgcactgaagacttatggcagtgaacacatctgatttcccacagcacaacagccctgcatgggtttgtttgtttttttactgctcactcccaaccttttgtaatgccattttctaaacttatttctgagtgtagtctcagcttaaagttgtgtaatactaaaatcacgagaacacctaaacaacaaccaaaaatctattgtggtatgcacttgattaacttataaaatgttagaggaaactttcacatgaataatttttgtcaaattttatcatggtataatttgtaaaaataaaaagaaattacaaaagaaattatggatttgtcaatgtaagtatttgtcatatctgaggtccaaaaccacaatgaaagtgctctgaagatttaatgtgtttattcaaatgtggtctcttctgtgtcaaatgttaaatgaaatataaacattttttagtttttaaaatattccgtggtcaaaattcttcctcactataattggtatttacttttaccaaaaattctgtgaacatgtaatgtaactggcttttgagggtctcccaaggggtgagtggacgtgttggaagagagaagcaccatggtccagccaccaggctccctgtgtcccttccatgggaaggtcttccgctgtgcctctcattccaagggcaggaagatgtgactcagccatgacacgtggttctggtgggatgcacagtcactccacatccaccattg

SEQ ID NO: 275 - DNA, 638 bp, Homo sapiens
gaagtaggggagggcggtgctccgccgcggtggcggttgctatcgcttcgcagaacctactcaggcagccagctgagaagagttgagggaaagtgctgctgctgggtctgcagacgcgatggataacgtgcagccgaaaataaaacatcgccccttctgcttcagtgtgaaaggccacgtgaagatgctgcggctggcactaactgtgacatctatgaccttttttatcatcgcacaagcccctgaaccatatattgttatcactggatttgaagtcaccgttatcttatttttcatacttttatatgtactcagacttgatcgattaatgaagtggttattttggcctttgcttgatattatcaactcactggtaacaacagtattcatgctcatcgtatctgtgttggcactgataccagaaaccacaacattgacagttggtggaggggtgtttgcacttgtgacagcagtatgctgtcttgccgacggggcccttatttaccggaagcttctgttcaatcccagcggtccttaccagaaaaagcctgtgcatgaaaaaaaagaagtttggtaattttatattactttttagtttgatactaagtattaaacatatttctgtattcttccacaac

SEQ ID NO: 276 - DNA, 2584 bp, Homo sapiens
gctaatccggatataatgctcttggcagttggctctcaggactgtgcttagtccctgagcacaaaagttcttaccttggttgggggtgggcagatggtacaggtggattggaagtgaccgtctgattatcatttgggattgagtctgttgtgtgctgtgtaaatttaatttacccctttgctctttgtgtcagttgagaccaactgaaaagtgattgctttcagtaagtaaccttatgataacacgacgcttcattttgtgtgattgagttttgggacccagtttataggatcaaggaagggttttactgggcattttatgttcaggggttatatccctggctttagtattgaggactttgaagtttacaagttgtcatgtttagcaccctcaggtgctcctgtgccatagataagctcctgcactgataacagtctttccagaaaaatgcctgaggagctcatatttagtcattctgattctcaggtatcaacttgaactgaaggatgactacatcattagaactaatcgactgattgaagatgaaaggaagaataaagaaaaagctgttcatttgcaagaggagctcatagctattaattcaaaaaaggaggaactcaatcaatctgtaaatcgtgtgaaagaacttgagcttgaattagagtctgtcaaagcccagtctttggcaataacaaaacaaaaccatatgctgaatgaaaaggttaaagagatgagtgattattcactactaaaagaagagaaactggagcttctggcacaaaataaattacttaaacaacaactggaagagagtagaaatgaaaacctgcgtctcctaaaccgcctagctcagccggctcctgaacttgcagtctttcagaaagaactacggaaagccgaaaaggctatagtggttgagcatgaggagttcgaaagctgcaggcaagctctgcacaaacaactgcaagacgaaattgagcattctgcacagctgaaggcccagattctaggttacaaagcttctgtaaagagtttaactactcaggttgccgatttaaaattgcaactgaagcaaactcagacagccctagagaatgaagtgtactgcaatccaaagcagtctgtgatcgatcgttctgtcaatggattaataaatggcaatgtggtgccttgcaatggtgagataagtggggatttcttgaacaatccttttaaacaggaaaacgttctagcacgtatggttgcatcaaggatcacaaattatccaactgcatgggtggagggtagttcccctgattctgaccttgagtttgtagccaatactaaggcaagggtcaaagagcttcagcaagaggccgaacgcttggaaaaggctttcagaagttaccatcggagagtcattaaaaactctgccaaaagcccactagcagcaaagagcccaccatctctgcacttgctggaagccttcaaaaacattacttccagttccccggaaagacatatttttggagaggacagagttgtctctgagcagcctcaagtgggcacacttgaagaaaggaatgacgtcgtggaagcactgacaggcagtgcagcctcgaggctccgcgggggcacttcctccagacgcctctcttccacaccccttccaaaagcaaaaagaagcctcgaaagtgaaatgtatctggaaggtctgggcagatcacacattgcttcccccagtccttgtcctgacagaatgcccctaccatcacccactgagtctaggcacagcctctccatccctcctgtctccagccctccggagcagaaagtgggtctttatcgaagacaaactgaacttcaagacaaaagtgaattttcagatgtggacaagctagcttttaaggataatgaggagtttgaatcatcttttgaatctgcagggaacatgccaaggcagttggaaatgggcgggctttctcctgccggggatatgtctcatgtggacgctgctgcagctgctgtgcccctctcatatcagcacccaagtgtagatcagaaacaaattgaagaacaaaaggaagaagaaaaaatacgggaacagcaagtgaaagaacgaaggcagagagaagaaagaaggcagagtaacctacaagaagttttagaaagggaacgaagagaactagaaaaactgtatcaagaaaggaagatgattgaagaatcactgaagattaaaataaaaaaggaattagaaatggaaaatgaattagaaatgagtaatcaagaaataaaagacaaatctgctcacagtgaaaatcctttagagaaatacatgaaaatcatccagcaggagcaagaccaggagtcggcagataagagctcaaaaaagatggtccaagaaggctccctagtggacacgctgcaatctagtgacaaagtcgaaagtttaacaggcttttctcatgaagaactagacgactcttggtaaccatgtttgctgcccagcttctaacttacataccgtgagaagttacgtaacatttactcctttgtaaatgtttccctatcatcagacaaaactcaataaaaatgtgtgtaatcc

SEQ ID NO: 277 - DNA, 891 bp, Homo sapiens
gaactatgcaggaatttctctggtaaatttcactaagtacttaagtactttgcagaacgattgtgagtttacacccctaccagcaagactgagttgagtacccatttcctcacatccttgccagtacttcatttgcctaatttttgccattctcataatgtggcaattgttcaattttgcatttcttccattttatttttttgcatctctgcttttcttttggttagctttgccagttctgcctattatattaatctcccagaatcagcttttagttttgttaaatctctgacatgtttcgttgattcctgctttcatcttaaacatttcttcgttgttaatttgtgtttgctataaaataagcaacatcttaaatgcttgatttgctttcgatgtttattctgtaataagatatttaaagatataattttttccctaaatgctttattagacttttctcataagttttgactggtactgttttcattgttatttaattttgtgttttttaacttctttcatgatttccttttaactgaaggttttcttagatatttagtttgctggtatattcttttaaaattgtatcattgctttctttctatattggattattgtcagagaacatgatttgcatgatattaactttttggagtatattgttgcatctttgtggcctagtacatagttaatttagtgaatgcttccagttgtacttgaaaagaatgtatattttctgattattgagggtaaatttctctatatatgttttcctgtttaataaatataaagctatgtgcttaaaaaaaaaaaaaaaaaaaaaaaaaaaaaaaaaaaaaaaaaaaaaaaaaaaaaaaaaaaaaaaaaaaaaaaaaaaaaaaaaaaaaaaac

SEQ ID NO: 278 - DNA, 2106 bp, Homo sapiens
ttcagtatctcttgagttaatgacctggttaacaagtcagagtcacagtcccaagggcaacaactttttaaaggctcccctaacgtacttcaggatccctgactgagagtggctgactatggcagtatatgggcatactaatcactggagaaataatagcgagaaataaccaaggaaaagcactactctccaaaaacattaaaaaaaaaaacaattgaacaactagtaagaaagaacgctggatctgagcaccctgtaagtcacttccccgtgggccgggtaaaggttttaaaacccgccgcctccaggaagacggccacgtgcacaaggattagctgcaaactccgtgcccagtctggccgggagaattgctaaaaccgacctaccgttaacacccgggctactctgaaattaagcaaggctgtagtcaagtaagtaacccaagaaaaggcgcacagagccgccgccgcaggtgtagcccggggacatcccctcctaccttgcaaacggggcctgggatccggtccctctcttcttcctccacctcctctgctgtggcgtgccgcttagctggcggctccgcatctatttcgtttctttttggcttcttcgcctgaactgcaaagcctccacgccgtttcctcttggttgccgccatcttgcctcgccgcccgcgctcttggcctcctttccggcgctgccgctcgctcctatttccgatctctatggttcggcggctctaagcgctcagctccgcggtcgtcctccaggtctgtgccgcctccttccggtctcggtggcgcggcacgcgcggctctctaggcctccttcagctctgtggtgacggtggccgaggtggagggccggtctgaagagtggcgggactggcttcacttcctccgcggttcctcggagccgcctcgctcctcttcagggactttgctgagaagggctctcgggcgtccagaccccaccgcaaaggtgtttggcgatccgccgagaagttgttggccccaggagcatcccctcggggccgaatgcgcagtggacgatgccccttctgacccaacagatccaagacgaggatgatcagtacagccttgtggccagccttgacaacgttaggaatctctccactatcttgaaagctattcatttccgagaacatgccacgtgtttcgcaactaaaaatggtatcaaagtaacagtggaaaatgcaaagtgtgtgcaagcaaatgcttttattcaggggcatggtatggtggctcacacctgtatttccagctgctcaggagaccgaggctgaagcacgaagatcgcttgagctcaggcattaaagaccagcctggggactttaactgcacttcgaatgtgttaccaaggttatggttaccctttgatgctgttcctggaagaaggaggagtggtgacagtctgcaaaatcaatacacaggaacctgaggagaccctggactttgatttctgcagcaccaatgttattaataaaattattctgcagtcagaggggctccgtgaagcattttctgaattggatatgacgagtgaagtcctacaaattaccatgtctcctgacaagccttatttcaggttatctacttttggaaatgcaggaagttcccaccttgactatcccaaagattctgatttgatggaagcatttcattgtaatcagacccaagtcaacagatacaagatttccttactgaaaccctctacaaaggcattagtcctatcttgtaaggtatctattcggacagataacagaggcttcctttcattacagtatatgattagaaatgaagatggacaaatatgttttgtggaatattactgctgccctgatgaagaagttcctgaatctgagtcttgagtatgacaattcactgatatttatgtgtacatttatgatagatgaagttcttattctgagtacagtactctttgtcatttcatattggattttctatagagaagaagcacaatggggaagataggagcaaggtcatgtaccctaatagttactatgttttgtaaatccattttgtagagggcatgtaaataaatgttttcctgtagtcatagatt

SEQ ID NO: 279 - DNA, 3705 bp, Homo sapiens
gaatcacgcggggagtttggtctttatgggaagaaaggcgccgtggccattcggagagccactctggcactgctgccggtgcggtccggggctgcggggcctcctcctgggcctgaactgcagggctggtgggggccatgggggaaggtggctccacaggtccccggagctgggggagcaggaggatggggttgaccaggagggaaagctatggagctggagaatgcaggaggcccccgaggggaggtgcagccagcgctggtggggaggcctctgaggggtacgcggtaattgacatcacgggtgtgggtgagagtggctttcaaagcatcggctggagcagggtccccattaaagccagagacgctgacgccatggggctggggttggggctgggccggggctttgggaggtccgaactccccagcagggagccagggctctgggccagttcccaggcccagttaatcttcagtagaatcgatcgaccttggctcagagggttggaggcagggatgggcagggggtgaggggtgaggcgcacgaaacagcacccgggtgaggcccctgctgcggcctctgcgggaccagccacgaattccgggcttcagccccgccagcttcagaggcggcgttttcggtgcgacgctgccacctgctggctgtctgggagttgcacccagaggctcagaacccgtgtttctcagagggcccgggaggggcgaaactgcgggttcccaggccctcccggattctgcgcaggtggacgctgggggctgtttcacaggcgcccacatgataggggagctggaggaacctgccgtctccgccatcgagcgcccctccgagctggggttggacgctgccagtttgcacagcagcaggtgcacagcccaggggcattgtacacaaccgcggtgttgtgcagccgacgcccccatccaactccagaatgtttgtatcttcccaaactgaaactctgtccccagtaaccccggctcccctcctcccccacccgctggaaaccacgactccgccgcccacctctgcatttgactgctccaagtacctcaggaaatgacctcatgcggtctccgcacgttcgcgtccatcttgtttatttccagcgtttggcccgtgggagcgatgagcgcacctgttcagcccctgctttcagttctttcagggagttctcacgtggtcttcagaggttcccacacgctgcttcccacagcagctgcaccattgtacattccaacagcaacggacaagggctccaatctcttcgtattcttgcaaacatttactattttatgtggtttttttttcttttcttttttttttttttttttttttgagacggagtctcgctctgtcgcccaggctggagtgcagtggtgcgatctcggctcactgcaagctccacctcccgggttcccgccattctcctgcctcagccgcccgagtagctgggactacaggcgcccgctaccacgcccggctaattttttgtatttttattagagacggggtttcaccgtattagccaggatggtctcgatctcctgacctcgtgatccacccgcctcggcctcccaaagtgctgggattacaggcgtgcgctactgcccggtttgaaaaggcaattgaggtttctaaactcctactaaaggaaataattcctagagttgggctgcctaagagcttacagagcgataatggctcacctttcacagcgacagttacccgaaacacatcttcagccctaggaattcagtgccgccttgactcggcacggaggccacagtctttggggaaagtagaaagagctaatcaaactctaaaaaggactcttgctaaactatgccaagagacatcagaaacctggaggtctttattacctgtagccttattacgggttcgaatggcccctaagggaaatctgcatctcagcacttttgaaataatgtatagaaggcctttcttaactacagacctcctaatagacatagatactttcaagctacagaattatgtgatcaacttaggacaagtgcaaaacgcactccttgactatggaaatcagagactcccttcccccactgaggaagacaatctggttccaacccagctgggagactgggtcctattgcaaacttggaaggaaggatcctcagcagatcaactttccccgcaagtggaggggactctatcaagttctccttagtaccccaactacagttaaacttctgggaataaacagctgggtccacttatctcaaattaaacctgtctcttataaagccccacaggccaacggaacacaagagactgatcccgtttattcccgtgagccagtcagtgacctctgattcctgttcctaagaaatgagagggatggggggcataaatacctggattggcattctacttttaggcacaagttggaatcatgcagagagtgatttatttactgagtaggcacagactttagcctgtctacataatcacataaacggttgggtatgtggagaattgccactttcctccacctctgggttgccctggcatagtcaactggccagcctaagtctgtggggattttacgttccagaccattacccaggctatgagagctttagagctcacgtctctgccattgatgagctgtcagtcagtcctctattggcttggttccaacagctgcccagttcttggaaagcctttctgtttagctagtttacttggaatgattttatttattttgctttgctattgtagaatatattgcggttgtactctttgtgtaggaatgcatgacaagctcactcaacactttcttcagttggacatttttttgtttttttttttttgtttttttttgagacggagtctttctctgtagcccaggctggagtgcagtggcatgatcttggctcactgcaacctccaccttctgggttcaagtgattctcctgcctcagcctcttgagtagctgggattacaggcgcacaccaccatgcctagctaattttgtatttttagtagagacggggtttctccatgttggtcaggctggtcttgaactcctgacctcagatgatccacccgcctcagccttccaaagtgctgggattacaggtgtgaaccaccatgcccatcctgtttttccttcttaaatgagacaagagggatagagaatggggctgtgtgtttcccttcccaacataaaagactggagggagctggagttgatacttcccttcctccaggttggttagactctgattaaactctggtacgttaaaaatagtttctcttgagggcagaggaagaacagaatgctctggcatatttcgaaagtgctacttctcccctccccttgtccaaagcacaaggggatttttctctggtatttacctgggggatctggtagagtttgtgcaggtaaaactcacagaagtgtggcctccaccctaagactgggccctggagtttttaactgtcaagcttggccacacagcctccagcaatctgccagtgacagtttaggttttcccaacctggcagtggttcccagggaggtgtctgctctgcagaattgggattctctgcatctgtctgtcgtctctacaacttttttgggcagtggtttgccctgtgacctcatcatctgttgaatataagaaatattattgactttc

SEQ ID NO: 280 - DNA, 1265 bp, Homo sapiens
tttttttttttttttaaagacagagtctcgttctgtcacacaggctggagtgcaatggcgcgacctcggctcactgcaacctccgcatcccaggttcaagtgattctcctgcctcagcctcccgagtagctgggactacaggcgcatgccaccacgcccagcttgttttgtatttttagtagagacggggtttcagcacgctggccaggctggtctgaaagtaaacttttccatatagctaaatgattccatttaaaaatattttattctgagagattctgttctttcaaattgtttgaatggaaatatccttttgttaaatgaaatgatggtgacaggagatagtggtgtgttattgtttttactggctgtacatggtagaattgaaaaatcagcatttctattgtagcctactaatttcggtgaaatatttctttagaaatataaaatctggaactttccatcattatgcctccccaaaataatagaggactttacacacagataacacctgcctctcaagattctctcattaatctctaccttaccgtgtttggattaagacacagggcttgcgaaatgagaataaagtgagtttgagcaatccaaaaccacgtgctgactctggatcctggaagatgattttcttcagaatctttgtctgttaactttcctctgggctcaaactttcttttcctaaaagagtcacatatttgagtactactgctacatggcaatcaccactcaaaaaaaactaacttgaggtgtccaataatcagctttcatttaaagtctgtttcaggctaggcgcggtggctcacgtctgtaatcccagcactttggaaggcagaggcgggtggattacctgaggtcaggagttcgagaccagcctgaccaacatgctggtctcgaatatgctaataggcaacaacgtttaaaagtcattccaatgcctaaaacaccaccatatacataacatacttgtcctttactccaatgaagcttaaactagacccaaactcagaccatttccttctcctggcacactgaaacatacgagagggaatccaagaaatcagatatgttaagtgcgggtatcttcttccacagtagggtcaaattcgtgtttgccagcaaatgtcaccgtcccagttaagtctgcaaattctcactagcgctggagtacaaagaggcctgaccacggaaacacctgtcctagcaccaggaagacagtgggaaaggcaacccccctgtctccgcgacct

SEQ ID NO: 281 - DNA, 2666 bp, Homo sapiens
  misc_feature 1259: n = a,c,g, or t
gagacagattctcacactgtcacccgagctggagtgccatggctcgatcttggctcactgcaacctctgcttcctgtgttcaagcgattctcctgcctcagcctccctagtagctgggattacaggctcacgccaccacacccgactagttttttgtatttttagtagagacggggtttcaccatgttggccagtctggtctcaaactcctgacctcatgatttgcccacctcagcccccccaaagtgctgggattacaggcgtgagcccccgtacccagccacctttctgtctttcataaggaaaataataactataatctaatcatactgtttctcaatccatgggagtgagaggaagtttctttaaaaataaaatgtataaagaagtgagtcatgttagattatctgagtgttagataagctgaggtggtgtggggatatggtaaagctcatgacactggtatgtgaaggactgaagtttgtcaagcccttcactagactagctgagactcagtaaataatcactctaagattggaaacttgaaatcctaacattggaaacttgaaatcctagaaatgcttccaaaattatgccagctgatttcattttcaaatgctgcacacagaggggctctcatctgtaaggaacggagcaccctcttcaactcctcatcatccttctctgttagtggtgtgagcactgtcatgacatcctctgttgactggcactgtggacagacatactcatcaatgagctctgcctcactctgcaagatgccaatgcagcacccatggtaccaattctgacaccgatcatggccaataaaaaatctgcaagatccgaaatggaaatgtgagttcaaaacagatgggatgatgttacttataataaagcatgcacctgaaaatttgctaaaccctgggatataaaatagttttagtattgtggttttaatactttcaagatcgacattccagtacattaatttagtatttttgatgttacgaacaagcagtaaaaaaatttataagaacactgtaattttggagaaccaatttaaagataaatatgaaacattcaattgattttacagctgaaaacaagtcacaaatctttcaactagtactgtaccatgtgggagttcaaaatcctataaggtaataacagagtctcaaagcttatacccaaattagtgtttttctaacctataataaagcaccatttcaaacactgataaagtccaaacaagtcaagcnattttaatctcattaatttctatgttacatattgaagaatcaaatttaccattaaaccacattttccccaatgtgtctcaaacattcactatgaagcaagataaattttgaagggtaggtaaaaagggaaaaagagaaaaaaaatgaaaaggaatttgtaatgtaagtgtacaacaaatgtagaaaaaatctgctttttattttaaagtaaataagtaaccagtcagagcaatttggcttcctaaattattaaatgtgatgctcttattagaactcactgtgactgcaggtgttctgcagatacagtacaattcctcactgctgtcctcttgtgcccatttacaatcattacagatgtacacatccattttcttagcctccttttctgcgatgccaacacattctccataataccagttagtacaaagatcacagccaatatagaacctagaagtattcacaacgaaaatgacaatgtaattgtcgttttgagctgcatggtacttaaatctgtcttccctgccttgcttcatttttttacaggataacttcctgctatgagtcagctaaacattcctgaatccaaccattctacccctggcaaactccagtatctgatgctctatcacatgtggaaacaaagtcactcacatcggtttcaacaagtacactgcttagtgaaatatgggtctttaaaaacatactggaatttgaaaaaataaaccacacactgatggtaatgtcttcctctgaatgaatgtgtgtaaaactgtaacaggcacaaaaaccaaagccaaagaatcaaagacttacatctgtcaaacctattccacagaagccatttcaatatcagggctatttcttagataggtttaaaaatgtatctcacaatttaaatttgaaaacaaagcaaagcgcaaacaccaagtagaagttacactacacggaccatgcaggtcagccaggtgtagaagataaatggtcaaaatatgctaagaagaagaaaactaagaaaggtacatagagcaattcaatctctaccaggttttctgaataaacattggaatttaatcaaattaaaaataatttctcataatggaatatggcatgggccagtttttcagttaatataatgtttgtgacaatgtgggcagtggcctggctaattaacgggtagggaacgtggaaggagctgcttcagttcaacatcggggacatggtatggggaaggatgcaaagatagttatccagaatctgtctacactgcttggcagggtctacactgcttggcaaggcagagctgtgtaagtgtgtgattgtggagtgcacagtggcctctgtaataaaagacgtaatgacaaaagaaaaagtaaatgtaacaaacgctcccgattgaattctagacct

SEQ ID NO: 282 - DNA, 981 bp, Homo sapiens
ggtacagctcttatcgttcacatgaccattaccaaaggcaaagagtgctacaaaaggagcgtgcaatagaagaaagaagggtggtcttcattggaaagatacctggccgcatgactcgatcagagctgaaacagaggttctccgtttttggagagattgaggagtgcaccatccacttccgtgtccaagggtaagcttgggccccaggctcaggatgttctttctatcccattcatctaccttggtgtttctttgtcttgcctccttgctctggtgtgctgagcaatatggggcaccttcatttctgcagtcagagggttggccactgggaatgagaagaaccacctctgtaccttgggatgctgtgtctcctctatggcatgggcccatatagccactccagcccctgcctcactctcctcctactagggacaactacggcttcgtcacttatcgctatgctgaggaggcatttgcagccattgagagtggccacaagctgcggcaggcagatgagcagccctttgatctctgctttgggggccgaaggcagttctgcaagaggagctattctgatcttggtgagtggagggagggcctaaagctttggaatgcttcatcccctccccagaagggttcctaaccctttgtgagtggggctaggcagacttaccttagtttgacatacaaagaacccaagggggctgggcatggtggctcacgcctgtaatcccagcactttgggaggctgaggcaggcaaatcacgaggtcaggagttcgagaccagcctggccaacatgatgaaaccccatctctaccaaaaatagaaaaaattagctagaggtggtggcacgcacctgtaatcccagctactcgggaagctgaggcaggagaattgcttgaacccaggaggcggaggttgcagtgagctgacatcacaacactgcactccagcctgggctacagaacgagactgtctc

SEQ ID NO: 283 - DNA, 1811 bp, Homo sapiens
gccgctttttttttttttttttgagacagtctcgttctgtagcccaggctggagtgcagtgttgtgatgtcagctcactgcaacctccgcctcctgggttcaagcaattctcctgcctcagcttcccgagtagctgggattacaggtgcgtgccaccacctctagctaattttttctatttttggtagagatggggtttcatcatgttggccaggctggtctcgaactcctgacctcgtgatttgcctgcctcagcctcccaaagtgctgggattacaggcgtgagccaccatgcccagcccccttgggttctttgtatgtcaaactaaggtaagtctgcctagccccactcacaaagggttaggaacccttctggggaggggatgaagcattccaaagctttaggccctccctccactcaccaagatcagaatagctcctcttgcagaactgccttcggcccccaaagcagagatcaaagggctgctcatctgcctgccgcagcttgtggccactctcaatggctgcaaatgcctcctcagcatagcgataagtgacgaagccatagttgtccctagtaggaggagagtgaggcaggggctggagtggctatatgggcccatgccatagaggagacacagcatcccaaggtacagaggtggttcttctcattcccagtggccaaccctctgactgcagaaatgaaggtgccccatattgctcagcacaccagagcaaggaggcaagacaaagaaacaccaaggtagatgaatgggatagaaagaacatcctgagcctggggcccaagcttacccttggacacggaagtggatggtgcactcctcaatctctccaaacggagaacctctgtttcagctctgatcgtaggcctctttggccgaattcggccaaagaggcctacaaggccagagtcagtggtctaaggatatatactgtgcctacggggaaagaagagttgggaacacattaatacgatcctccacacagacctaactattttattttattttattttatttttttgagaaagggtctcactctgttatccaggctggagtgcaatggcacaatgtcagctcactggagcctccacctcccaggcacaagtgatcctcccacctcaacctgtttaacttcttaagaaattctaccaaattgttttccaaactgactacactattttacattcccaccagcaatatataagggttttactttctccaccttggctaatattcattattgtctgtcttttttattgtcgccatcctagcgggagtaaagtagtatctcattgtggttttaatttgcatttctctaatgactaatagtgttggacatcttttcatgggctttttagccattcatatatctttggtgaaatttctattcaaatattgtgcccgttttgaaattgatagttttcttattattgagttgtaacaattctttatatattctggatatgttttatgttttattttattttttaatcagaaatgtgatttggccaggcatagtggctcacgcccataatcccagtactttgggaggctgaggccagcagatcacttgacccagaagtatgagaccagcctgggcaacatggcaagaccctgtctctgcaaaacattagaaaattagccgggtgtagtggtatgtgcctgtggtcccatctacatggggggccagagcaggaggattgcttgagcacaggaggccaggactacagtgagccatgtttacatcagtgcattccagccagggcaacagaacaagactgtttacct

SEQ ID NO: 284 - DNA, 1472 bp, Homo sapiens
gtggttatgacctttatttatataaaaaccaaatatttagtcaatttaccgtgtcttaatttaatctttgtacaccttccatttttaagtgcttaaatgagtactatattgcaataaaatgtagtgatataattaaccagccattaaaaatttacttctacagatacagtgtcaattgagtttatatattaggtacttgcatactttttatgattactatgaaaattagagcaattaaaattaatggtttctacaattaatctgagttctacaacctaaaattgccttcagtttactggcatccctggattagggttagacctgatattgtggctgacacagaaaggcaacaggaaattaacttcattattttcatattcataatatggcatatgagactcaccaggcaagcaaatccccagactggttaaaagtaaaaatttaaaagctgttagctatattttgtgcactgaatctttaatagcaaattgtctacaggctgcagttagagactttgctggaatatccatttctccttttagtccgtgccatttttgccacccctctaacccggggagagtagaagaggtgctgttgctgatgtgggtatggcttgaattcagttaaatatattaaaaagaaaacaattccttcttaaaccactttttcctctaggattgcaaggcacagttctactccagaagaatgaaatgtggttgagcacttcctcaaataggtttatgatttttataatgatcctttaaaatgatctatgaatgatttattagataaattctatacatacaaagtacagattcttcatttagcattgatttacttcttagttttcatctttctgacaatccaccgtcttttaaacctcttggcattttgttttttttggattccccaagcattattcaaaaactggacagcagctcttttactggtaacctcttgttggcaagagaacgggaacttatttacagtagtcctgttggttcctggcccatataatgaattatgtatgaaggcttgtgctgcttgttgccttgaatctctcagatcttggtctttttagccttacggccaagtagcttttattctggctgacagactgtactttttgtactttaactttcttggagtcatttcctttttcacagtcttcatttttcttttgcaaattaacttctttcacctttcctggcgatttcttgatgttagtctgtgaagctgtggttaacttctccaaaatagtgtctggaaggagttttcttttcttctgttcgatgaacagctcctcgcgtcgcttcctcttctccttcaggagcgttttatccctgcgcacggtctcccgcactcgccgctcctcttctctcgcttccgcctgggcgctggcgaaagtcagctcctccggggcctcatcgtcaaactcatcgtccccttcctcgtcttcctccaggggctcg

SEQ ID NO: 285 - DNA, 564 bp, Homo sapiens
aaaattgatcctgatctgggttattcttttctgcatgtgcgtgattgttcacctccttgtccaaatatgtacttcagaagagaagaactgtcatttgctcgctatttcataggattgatttcaatcatttgcctctcggccacattgtttacttttttaacttttttgattgatgtcacaagattccgttatcctgaaaggcctattatattttatgcagtctgctacatgatggtatccttaattttcttcattggatttttgcttgaagatcgagtagcctgcaatgcatccatccctgcacaatataaggcttccacagtgacacaaggatctcataataaagcctgtaccatgctttttatgatactctatttttttactatggctggcagtgtatggtgggtaattcttaccatcacatggtttttagcagctgtgccaaagtggggtagtgaagctattgagaagaaagcattgctgtttcacgccagtgcatggggcatccccggaactctaaccatcatccttttagcgatgaataaaattgaaggtgacaatatt

SEQ ID NO: 286 - DNA, 695 bp, Homo sapiens
gggaaagtaacgaaagggctggactactataaaagttacaaatacgtagttagaccaatagatttatatagtcaggtttttgtcatgtaatttattaactaactattacagaaacacagctaagaatatcaagtatttctctggctcttgacagaaaaaaatcagttgacttaaccctttgctgtcaaaagagttggcgtttcctgttctgggtgctactgccaaacgttatggtacttagagtcgggatgcacaacttcaaccaccgacttatcaatgcagccgcctgtgtattgcaattggccgttaccttaagcactgagccacccgggtttagttcagccatttcaagaagtatatttaacgtcggtagttctgctttattaaaatgcagcagaggtactcttctgtcccttccgtttatagttctctgagagagttctattttttggttttgttttgtgttttcttttgcattttgtatcttgtatttatccctgaacatgttttgtaccttttttttttttttttttaagaaaaggaattcttttgtgtatatatagatacttgcatgatatactgtagtcaatgttcggttcctcaaaaggtcttgctgctgtcaggtgttatgcactccatccatcataactgtatgaaacacatttcatatgtaaataaacgtgggacatttggcc

SEQ ID NO: 287 - DNA, 694 bp, Homo sapiens
gcggcagcagcggctgcttgagatctgtttctggggcctctggcggtggcggcctggggcggcgcgacggctggtgcgcaggtacactgatgctgaagtactatgagccttcggaacttgtggagagactacaaagttttggttgttatggtccctttagttgggctcatacatttggggtggtacagaatcaaaagcagccctgttttccaaatacctaaaaacgacgacattcctgagcaagatagtctgggactttcaaatcttcagaagagccaaatccaggggaagtagcaggcttgcaatcttcaggtaaagaagcagctttgaatctgagcttcatatcgaaagaagagatgaaaaataccagttggattagaaagaactggcttcttgtagctgggatatctttcataggtgtccatcttggaacatactttttgcagaggtctgcaaagcagtctgtaaaatttcagtctcaaagcaaacaaaagagtattgaagagtgaagtaaaataaatatttggaattactaatttgtcattaaatcattctatgctgattagcttcataaacattgaactttttgattttatagccacaatgctgcatattcatactttaattcctaaagaataatttttaatgttaaaacgtgataatgcaataaatagaaaaatgtggtttacaaaat

SEQ ID NO: 288 - DNA, 1393 bp, Homo sapiens
ttttttttttttttttttttttttttttttttttttttttttttttttttttttttttaagtctggccaggatttattaggaagcttattagtcacagtgaataaaagccatgaaaagaagaactcaaatctccaaattctggcatcggacttacaacactagttagaagctaataaacattaaggaatttccaaggggaatcttaactaagtctcaatcttactgaccagattacccacacacatagaaatgatccccatgctctccccagactgcttagctaggcagtggaaaagaccttctccccaagcttaagctatcacgcatcagcaggagactcctgtccttctagctataaccacaggacacatgtgcgtgacagacaactccaagctgggcaacttgacaagaatgctgaacaatgagaggggaaaggagcaagcaggaacaagtgttttagttggagaccctcctgatggctactactaacacaatccggaggcatcagaaagtttcctatagcccacaaatagtttcctttaaaaaaacaaaaacaaaaacaaaaaaacaagtcacacaacaatcttgccacaaagcaacatgacacttggaatcacatggccacattaactggaaaagcaagtgttatccatgactgccagatgccacccagcccaagacccaatttccacagcgccctagagaaccacgatggtcccctggcacctacacaaccctcccagtggtgtcgtatcttccgtaggccaggtttctgcagcaagccccaaagacaaagcttggcagaggctgtggcagccaactctctctggagcctcatccctttgtccttcccaacaggtagtcgtacatcttcactgacacagcgcctctatgggagccttggccagcccttaggaaataaagtgtgtctgtggggtaacctgatggaccctatggtctgctgggttggcagatgcttcgtaattgcagatggtcacctcgtgtcggcgaagctcagtccactctcctctcaggccaatataaaagacctttgtcgtatctgctccgaagtttttttgaaatatgaattgagagatgatagacatttgaaaaacgagaaatttttgtagcatactctaattctcctgtaagatcccggttcagactaaaggtctgatctggctccctttctgtatcatcaaaggacatctgtggaatattcttgtacagtctcatctcagaggggtgtgagtcatcatcctctcccattataatgatgcctttgagcttgacattgcccgtaaatggaatattaaacagaagctcttcatctgcatcactttcaacaaacttggagcggtcggtccgctcctcccacggcttgaagacgcc

SEQ ID NO: 289 - DNA, 1733 bp, Homo sapiens
aggtctagaattcaatcgggaatatcttttaagttttaaaaaaactggaataattatatctatcttttttgccgtttatatttaggggtttttgttgataaaatcaagtcttggttgtggcttgctgaattaaatatttatgagtggtgcatttttaagtatagtgaacaagacaccatattaagtacagtgataaagcatctatattctgtaaaaaaaaaaaaaatctgcctatgcatgttttttaagaaaaaaaaaatggctgtatcggcctgtatgggactgtaatgcgcttagtggtctgacatatactggaaatgtatgtatactggcgtactttatattctctaaaatgcttaatgcctttgaaattttgtaatcaaaaaaaagctttgaaaaatctaaaggggagagtattctttaaagtttttaacataagcttgtcaatgcacatgtagatggttagcatgtttagcaaaccttgtgaaattataataagtttgtagttacatgtgaaactctaaatgcatggcaactgttaatgtcataacagtttagttattttgttctgttctgtcatgtgccacaaaatatgtacttttttcacttttttccctttgtatatcagttacgggttacaactggttcattctgaaaacaacaacaacaaaagtccattcatattttttaacaattgtataagtgcccaagtaattcactacagcctaaagccttgcctttgtaatttgacttctgacatgttggcaatcaaagcatgcacttgtaacaatgaaaaagaaaaagcattttatattactactcaataaaatgtgcatgaacttacagaattctcatccttccactgagtccgctgaagggatttatgtgcacaaccaccatgtgtcttctaggtgctggcccaccaccacacatcacaggctgatttccacaggcttcttcctaggggcctcgtgatctgaggggtggtgcctacttccactgtaagaaagaatcttggtggatttgtgtctcaaatcagataagagaagcctgtttaaagagcagatgccatcttctggcttcctcaaggagccagttaaaaaaccagagcattcctttttattgaaaaataaaattaatttgttatcaggttgtttcagttgtattggatgccctatctatctgctaaagcaaaaagtactaggctactaagtgcattttcatcacagaaaagagttgcatttgtattaacaagaaatttgtatacccacgcttcagctactatctaatcatcacccgaagatttaagatacaccaaatttcagtttgtttgtaacattgttcatctttagtgcactttgttttatataataaagtatgcctgttatattaaataataagaatatggcaattagcgatatagcatacccaaacaaagatgttctcgatacagtctggcaaagactatcccaaggttattttaatgaattcagacattttttcctgtggatatttctccatcctaaaaaaagtggcaaccaaggaaaatatttagatgcaacttactagagtgatgatgtgaaagaaatggtgattctggtatcatggtgtttattttctttcttataactgcagagaaaatatcctgactaaaaaaaattcatttttttggattcctttcttttacaaattgtgctgaggcaactatggcatagaaataaacatttgacatt

SEQ ID NO: 290 - DNA, 2195 bp, Homo sapiens
  misc_feature 98,1013,1014: n = a,c,g, or t
cagtggttccaccaacatggagctctcgcagatgtcggagctcatggggctgtcggtgttgcttgggctgctggccctgatggcgacggcggcggtancgcgggggtggctgcgcgcgggggaggagaggagaggccggcccgcctgccaaaaagcaaatggatttccacctgacaaatcttcgggatccaagaagcagaaacaatatcagcggattcggaaggagaagcctcaacaacacaacttcacccaccgcctcctggctgcagctctgaagagccacagcgggaacatatcttgcatggactttagcagcaatggcaaatacctggctacctgtgcagatgatcgcaccatccgcatctggagcaccaaggacttcctgcagcgagagcaccgcagcatgagagccaacgtggagctggaccacgccaccctggtgcgcttcagccctgactgcagagccttcatcgtctggctggccaacggggacaccctccgtgtcttcaagatgaccaagcgggaggatgggggctacaccttcacagccaccccagaggacttccctaaaaagcacaaggcgcctgtcatcgacattggcattgctaacacagggaagtttatcatgactgcctccagtgacaccactgtcctcatctggagcctgaagggtcaagtgctgtctaccatcaacaccaaccagatgaacaacacacacgctgctgtatctccctgtggcagatttgtagcctcgtgtggcttcaccccagatgtgaaggtttgggaagtctgctttggaaagaagggggagttccaggaggtggtgcgagccttcgaactaaagggccactccgcggctgtgcactcgtttgctttctccaacgactcacggaggatggcttctgtctccaaggatggtacatggaaactgtgggacacagatgtggaatacaagaagaagcaggacccctacttgctgaagacaggccgctttgaagaggcggcgggtgccnngccgtgccgcctggccctctcccccaacgcccaggtcttggccttggccagtggcagtagtattcatctctacaatacccggcggggcgagaaggaggagtgctttgagcgggtccatggcgagtgtatcgccaacttgtcctttgacatcactggccgctttctggcctcctgtggggaccgggcggtgcggctgtttcacaacactcctggccaccgagccatggtggaggagatgcagggccacctgaagcgggcctccaacgagagcacccgccagaggctgcagcagcagctgacccaggcccaagagaccctgaagagcctgggtgccctgaagaagtgactctgggagggcccggcgcagaggattgaggaggagggatctggcctcctcatggcactgctgccatctttcctcccaggtggaagcctttcagaaggagtctcctggttttcttactggtggccctgcttcttcccattgaaactactcttgtctacttaggtctctctcttcttgctggctgtgactcctccctgactagtggccaaggtgcttttcttcctcccaggcccagtgggtggaatctgtccccacctggcactgaggagaatggtagagaggagaggagagagagagagaatgtgatttttggccttgtggcagcacatcctcacacccaaagaagtttgtaaatgttccagaacaacctagagaacacctgagtactaagcagcagttttgcaaggatgggagactgggatagcttcccatcacagaactgtgttccatcaaaaagacactaagggatttccttctgggcctcagttctatttgtaagatggagaataatcctctctgtgaactccttgcaaagatgatatgaggctaagagaatatcaagtccccaggtctggaagaaaagtagaaaagagtagtactattgtccaatgtcatgaaagtggtaaaagtgggaaccagtgtgctttgaaaccaaattagaaacacattccttgggaatgcaaagttttctgggacttgatcatacattttatatggttgggacttctctcttcgggagatgatatcttgtttaaggagacctcttttcagttcatcaagttcatcagatatttgagtgcccactctgtgcccaaataaatatgagctggggatt

SEQ ID NO: 291 - DNA, 305 bp, Homo sapiens
gcaaggaatagttgttgggtttttgttttttggttgttgtttttttttttaggcaagaagtgttgccggtagggtatgtgtgctttctttgccttcctatttcctttcaaagaaatctcttgtaaattacaaaactgtgaattgggttgccaaaaactgttgcccttcgttagatgcttcaaacagtgtaaatcctatactgcaccctgtccacctctgctccctcctccctcccctgagagtgaggacctcatccgaccatgtaattaccattcgcttgctattaaagagcctttcaaactctg

SEQ ID NO: 292 - DNA, 819 bp, Homo sapiens
tgataataaacataaacaaatgcaagcaatggatcagaaatgtttatgtgataattggaatatagaaagcagactacatagtattgatgtagaatatcctgcaaaaattggagcaaatgataccagatataagcaggggcctcccaagggagtccagagatgcttcaacttcagagtcagcaaatgcaaagtgctgggattgcaggcgtgagccaccacgcccggcctgatttcctgttttttatctattcaaactataagaagattacctgctgacatacctcaatatttctatagaaattgcgattgatattccaatttaagggagtaatcatctagaagagacatatacaactggtgagaaaacacatttggctcggcacacttgttaacatagtacgtttatatttatgaatgacgaacagcatgacatctgaagacaacatcatcaagagaaagatccaggatgaactaaaaacaaaccaaaacaaatcaaccctggaggaaatagagataatgcagagaacaaaaaaaacaaaacaaaagaaaccttaacaataattcttattgcccttataaatatttaggtgtaaattgaatctattggaaaaaatgtttataaatttaataaatgagtgtggaaataaaaaagatagccaaagtccaaaaggtaaaaatcaacatagttaagatatatagcagaacaaattatctcaaaaaatagcaataagtaatctgaaagaaaaaaatcaaggaaatttgacagaatttggacagaaaagaaacagaagaaaatgattatgaggaaagttaagtaat

SEQ ID NO: 293 - DNA, 1057 bp, Homo sapiens
agttaagcaagccgggtctggccttgggccctgggccttccagccggggactctgcgcctgcgccgcgcctggccgccgcccgctctcccggcgcggcagctgtctgggctgctgcgcgccgcctaggtgtctgggcgatctatgggcaagagcaagggccacgatgacagattacggcgaggagcagcgcaacgagctggaggccctggagtccatctaccctgactcctttacagtattatcagaaaatccacccagcttcaccattactgtgacgtctgaggctggagaaaatgatgaaactgtccagactaccctcaagtttacatacagtgaaaaatacccagatgaagctcccctttatgaaatattctcccaggaaaatctagaagataatgatgtctcagacattttaaaattactagcattacaggctgaggaaatcttggtatggtgatgatttttactctagtgacagctgtgcaagaaaaattaaatgaaatagtagatcagataaaaactagaagagaagaagaaaagaaacaaaaagaaaagaagcagaagaagctgaaaagcaattattccatggtactccagttacaattgagaatttcttaaattggaaagccaagtttgatgcagaactcttggaaattaaaaagaaaaggatgaaagagaagaacaagcaggaaaaaataaattaagtgggaaacaactatttgaaacagatcataatcttgacacatctgatatccagttcttggaggatgctggaaacaacgtggaggtagatgagtctttgttccaagaaatggatgacttggagctggaggatgatgaagatgatccagactataatcctgctgacccagagagtgactcagctgactaatggactgtccccatctgcagagaggcttgactgccacagcatctgtggctatgctcagagggttatgattttcctttctttttttctaagaaaaaattattttcaggagaatattcttctgatagctttcatcattgaacttaataaactgaccttaaaatttc

SEQ ID NO: 294 - DNA, 1794 bp, Homo sapiens
gctgtgacgcagacacgcacagtaatacacagatggaggctcaaaagacacgagtttcgcgtcctgaaattccgcttccagggccaagctttcttttctgatactgtttgtccctcgcgaggcaccgttgggtcgcgcagtaggcgtgactaggggcgggaagtggggcgggagcagggccgcggagcctgggctgcggctgtcatggacgcctgggtccgcttcagtgctcagagccaagcccgggagcggctgtgtagggccgcccagtatgcttgctctcttcttggccatgcgctgcagaggcatggagccagtcctgagttacagaaacagattcgacaactggagagccacctgagccttggaagaaagcttctacgcctgggtaactcagcagatgcccttgagtcagccaaaagagctgttcacctatcagatgttgtcctgagattctgcatcactgttagtcacctcaatcgagccttgtacttcgcctgtgacaatgtcctgtgggctggaaagtctggactggctccccgtgtggatcaggagaagtgggcccagcgttcattcaggtactatttgttttccctcatcatgaatttgagccgtgatgcttatgagattcgcctactgatggagcaagagtcttctgcttgtagccggcgactgaaaggttctggaggaggagtcccaggaggaagtgaaactgggggacttgggggaccagggactccaggaggaggtctgccccaactggctctgaaacttcggctgcaagtcctgctcctggctcgagtccttagaggtcatcccccacttctgctagacgtggtcagaaatgcctgtgatctcttcattcctctggacaaactaggcctctggcgctgtggccctgggattgtggggctttgtggcctcgtgtcctccatcctgtctattctcaccctaatctatccctggctacgactcaagccctgaccttccggtacaggataaggagggggacctgaattggtgagatggaatcttagatcgtcccccatgtgccagcctcattcgaattctactctttggttaaagttagaaattcagagatttaggggtggaggaagagctttggggaagatgaggtaaggaaagatgactcgtgaagttaataggatgtctctaatttctagatgtgcctgagcttctgttcttttcctctttctttgtgtctctcttgaatatatttactttgtgtctcttaactctgtttaaggttctgtgtctatgcatctctctctttcttttttcaaccttctcattctcctatccagggatttaatcagcagaattactttttgataggggaggtataaggtttggcctgtaaggttctaactgcctttttttttctcacagaggtggcttatggcagatttttcctccttcaaactccaaacataatttttaagactatgtgccagtggactcttcccttatatctctgcaccacaagttgttggatgtttcctcttcctcccttatgtctacctcaccaacctcgctcatcatttggcccttatccttccttgtacacctaccttcagatttctgcttacactttgatttcagagctttattccccagtctgttcttactcctttgtcgcttatccagaatgatgctatgtgtagcatcttgctgtaaatcctgtacaatgattctgtgtaaatagctgtggcctatgccaataatgaagagcaagcctttcaggtaagcaaattaaagttcagtttgctcatc

SEQ ID NO: 295 - DNA, 447 bp, Homo sapiens
cttgacaaacccagcacaaggtgaaatggttgactgtctccttttccttccttgttcggttaaatctatttatttttggttcttggaagcagaaaattgcatgccttttttctttttttctttttttttttcattttctttccctaaatgcttcatctccctacccctcctgcagtgaacctaatgtcctcgatgactcccagggcctggccgccgagggcagcctctctaggtacagtgtcaatgctacctgtctattggtgtctgtgctgggaaactagctgttccctgtctcctctgtctctctgtcttctctgtctcttctcgccccgccttcccatgacgacctcacaatgaccacgccccctgcagcttctggagcgctggtggcagcccccgccggccccgccttcccatgacgaccacaccgctaacaatcaaaaaaag

SEQ ID NO: 296 - DNA, 3858 bp, Homo sapiens
gtgtcctgtaggtatctttttcccccttagtttatgatctagtccaggaataatatcactgatgtgatgagtgtccatctcagggcatatatcagtaggtgcattggtttggcctatgaaaagtaaagtaaagtaaaggttcctcttcaaagactttcctccccatgtaattaggaataaatagtaacttctcttaaaagcaaaattaattcaaagacctgtactaacattctgaaatatctgctagccgtaataaaaaaattaatgtactttatgttcttagctcccacaatttagcctaaatatttgccctagcatgcttatactgaatccaagcaaacattgtcatagccgttcctcttctttatttaaaagcgtttttacctttctcagcatcctgcaagttacttcctccttcctttgttctcctctacctttgcctcttttaaaaagttctgagttactatccaatcaggacagatacaaaatgtaaggtcctgttgcagccagtgaaaaccggacagagcagtaaagtgaccgcatcaggttataaatgaccctgtctcctttgttcggtgtactctcatggcaaaactgccggcgagtgtacgctttctacaaaaagtaaaaaaatgaccttgctaaaaaaattaaatttatattcaaatactagttctttacggcaccaagaagcaagcatttcatacaggcccaatgttggtgaagttagttttgactacttcagatggcattcattgggtttctccattgtgaagttactattttgttcctttattaattggtaatttgtggagagatactttgagattacgcagataatcctgtgcctcaccaaattttcacacactggttttagcatccattggtgtttttctaacaccagaatttcttctacattaatcagttgccatctactgtgagagcttttccttcttccccaacttatttgttcattcatcatttaggtatggactctttgattcgcattttattttatgactattatcatcaatctcttgtttagattcccaaaatgtattcagtttggccaatagaggactcttcaagctggcttcttttatctttgacatctcattttttgaggacttccatattttgtcttaagaaggtgtttcagactcatattttccctgcctgaattttagagtcagccattttaccaaggaaccctagtttcttttctttggctaggagaacagtatttagaaacccagctctgggtgctagattttcttatggttactggtgggtttcttacatctgcctgtgtattctaggccttcataagcaaggaaaaatatgtatatgtgtgtatttctgcagttttctattttttttgtgtgtgtgtttatgtatattttaaaactcaaactgttgacttcccactgactcctccatttccatccatcatcataggatatagtctaggctatacccaatctttccatgctttgttttccctcagaaacaccatgaagctgctgagatcttgttgaaaattggcacctaaaatcaaaagtattttatgtgtatttagtaactgtacaaaaatctcccggttttatcaacttgactaatgtttcttgaaatggtaatatgtttatggaaggattaagtagtttctgtattaagtaatagaagcgacacctattgagcatgtggtaggcatcagggactattgtagacagtttatatatattacatcagtaatgatataatagtgataacacacgcatgcgtgcgcgcacgtgcacacacacacatacagacacacacacacacaaacacatttttgagatggtcttgctctgttacccatgttggagtgcagtggtgcagtcatagctcactgcagccttgaactcctgggcacaagtgatccttctgtctcggccttctaagtagctgggcctgcaggtatgtgccaccatgcctggctgattcttaaattttttttgtaaagatgaggtctctccatgttgcccacgttggtctcaaactccagttgtcctccctccttggcttcccagagtgctgagattataggcatgagccactggtccaaacacccacactatatgatcctttacttacgtgtaatttttatttatgttgaaaagagcactttctgttagactatgacttataatgaacatacaacttgatatgaaattatgatttgatatactaatattcattctacaaatgatccttctaaggagtagcaagtgaattaagtaacattaaattatattcctactgatataaatcctattgaattgtgaccagtagaattttacatttgttgagtgtcgtgacttaccaccataacctgtgtggatttagtctagataatacttactaaattgaattatataatatgtgttgggaggttgaaaataattcatgaagtttttctgtgaagagagtgaatcccttaagaataaaaataataggaaaacctgactttgttttctatagtgcttcactttttggtatttttttccttaaaatgttctacaagctgtcataagtttctgtcatattagttactgtaagtaactggaatattgaaataaagaaattctttttaaaagaagcattatgtttacttagttttaagaaatacaagcaaatgaatacattagatctttttggccttgtattcctgtgttctaatatttgaagtaggttttctcttttctgagaatatataacttgcaactaacttgtgtcatcttgaacaaggcaactgctgaggctcaatttcttaatgaaatggagtgatctgttctgcagttcttacctcataagagagctctttaagttgagtttagcttctggagtatggtccctgaatcctcatacttattatagttcctgaggcataaacaagtgatcagtttttgtttattgaatggggaaaacatcacatgaaatctttttgtataagacacttaaaaatttaaatatccaaatgctaggtaatgctgttgagtaattttttattgaaagcattttaaagagcatttgagagcacttgttgaatttaaaatatgaagtgtattttgaaatacactgttaataaaggtaattttactcacactgtttggctgctatttacagtttgaagaccaattaatatgaaataattctttatgattttaaaggtctttagttttatgaatttattataaccaagttgaaagtaatttttaaacagtttattgaaaatacagtaaccatttaagagactggttttctggagcaaagactatctctgggacctgaaaaccattctttgaaattctttccctggtgtgcctgagtctttcttaacttggtggttccatgttgaaggagttgttaaatgcagccccgggggcgggggatgggtggggtggtgggggaagttctgaactgtagtttaaaaagctttcacaaacattttggttactcagtttggatggtgttctttaagtgagttttattgactcgtggaatcattgatgacagattaataatttaaggttcaagtctggcattgctatagagaaatacctgagcatttggcaggccaaggtgggcagatcaggaggtgaggagatcaagaccatcttggccaacatggtgaaaccccatctgtactaaaatacaaaaaattagccaggcgtggtggtgcgtgctacttgggaggctgaggcaggtgaattgcttgaacccgggaggcggagcttgcagtgagctgagattgcgccactgcactccaccctggtgacagagcaagagtctgtctcaaaaaaaaaaaagaaaaag

SEQ ID NO: 297 - DNA, 2512 bp, Homo sapiens
ccaagctgtcgacctttagtttgccatacgggtaggactgtatttcatgttaacaactggtggtaatgataagccttcttctagcgtattttctcttctttcctgtcactttcctaagtttttttttttaaagactggaattttttttggctttatcttgtcttaccgtagagatttgttcaaaactctaagccctaccacctcccctttaataagctctttaaatagttgaatcattaacaacctggtgggaggcaagtcatttaattgaaccactaggaagtgtattttcttttctttttctgccaactttttggtggcatttgtaaaagctgatataaaaggctctgagatgttattttcagttattccataggcaagcctttttacagagcatatgtctccagttggcagcttgagatatttccgagcatccggttctagctaccagtgcctcccaatgcttagtgcacagtactgtagactggccatcacccctctccttggaaaatgccactgtgctgtttgaaaaaaagcagccttttagggctagagtattttatataaacagaagagctaagttcctgaagactaagctagatagctgcagctatatgtaaattgtatatttttatgaacttttgaagcacacactcctgtttccctctgtgtagctttgtggggatttcatgtatatatgctgtctgaaagaatccagaggttggagtgccaatagaaaatgaaaacaaatgccttgtactacaggcagcctctgaaggtgaccacataactgtcttcactgtgaccaatcggagtccctgcttgcttgtgaagaaggggcttttgtaccttgttggagatgccacctcagaagttcacactgtgcaggaaaaaggttttattctctcctggcatacattagaatgtcagatgcttgcatccatgtggaccacgatgggcctctaaaaattggtgggcagggggtttgcttatgagttttctctggaaaccgattttactcctggatgtattgaatgccccttgagctttatgagatacgagtccacatggataaaatgttagagagtggagttctacagaggattccaggaagaggccatgtctgtgcagtcctagttccagacaggtgagaagctccaggaactactggctaccttgacaagctgggtaaatagttatcattctgggtaactggttgaaactctgacttttggacaagtaattcctggggttctgtctttggtagcatcaccagggatatttgggtgggacagacagaagacacacagctgcctgttctctcctgcccatcatgtttggcccactagatgaagctgtactcagcaatttagggaatgtaacccttctcagaactggccattttcaggggaagcttgggagagcaatagtatggtgagccccttagagatgagcgcctactccttcttggcgaatgctgccttcagatgcttaccaagtggtcactgcatctagtaagattatatttccagtacacttccttagggcagaaacaccatcctatcaggtttggtcagtcccttcttcatgaagggagtcatggggaattcctgaaaattttcttccttctgcagacagttggatgagtcccttagagaaggcatccagagacataactaaactgaatatcatcccatattgattttaggaattgactctaaaactctgtgcagaatcttgtgttgggattgtatcttgacattcctgttgtgttatttttcttaactggagtgtgtgctgcctttcaggtacaatttttgtgtaataaaagccagtgcattaagtttatatagactactttctatgcaagactgagatatggaatagataggaagagatatgtactgctgggtacatggacagtaagtgtgttttcagatggagtaccagcaccgaaaatgggttgagggaggatgggttgtatgtatgtttctgcccactaattttgagcagccatattatgaattaaatcgtcacagccaagtaataacccaagaatggtatgagtttcatgtgtaatagctcaaatggaataagcatgaatgctggagtggaccattatcctcaaatattctatgtcacttctcatttaaagactcttgttatgaactattagaaactttaggcaaaatcaaaagtatttgcggcaaaataaaggcctattctactcttatttaaagtgaaacactgtatacttgtttctctccaaagcgaaattaagtatttataatttcaattgcctcgataagtttccaagtcactgaaatctgctgaaggttttactgtattgttgcacaactttaagataatttttgtctcaatgtcaacttttttcactgaataaaaatttaactgggtcaagaaaacacctctttgaaaatccactgtctctgtgtgtctcgagctgttctttagagcgcaataaagatggctgacgcagtctccaaacccc

SEQ ID NO: 298 - DNA, 1107 bp, Homo sapiens
ggccgcttttttttttttttttttttcccgtgtatatttaacaatatatatttatatatattttctaaatcagtacattcagtttttaacttgtttttttcttcacaaacagaagaactcttacaatagtagactttctaaaataaatactattaaaatagagcttcaaaataaatattctatacaaagaaaacctgtggcaactttgtggtggggtggaaatgggctacagtgagggggaaatgaagttgggatgtggcggggtgggagcctcgagcttttctgtttgtaacatgaaaccaagctgtgggacagtaagaagagaaagcaaggcaagacactgcacgcagttacccacagcagaaaatggcaacgcaagattcatcatcgactgtcacagtaagcagagggggcacaaaaatgcttgtcaaaggcatgaaccagaaggctagtgaggctcgcaggatgccctagtgaatcgtacagtgtagagctgtgctgcccacgcccgccagacacttcctgggacagcacagaaggagaacaggacgcttcaaggtgacagtcatccgggttctggtgcagatcaactttccacgtgtgccatcttggacaagtcattatctagctgggcctcactcgaggtatgatggcgactgacaggctccacaaggctgaaaagaactagccatgtcttccatctcagctctgagggggtgcgtaccaaaggaccaaaggaagggattggtcttcaccccctccccacatcaagcccgaatgatatttcctattcgcctacacaattctccgatccgtccctaacaaactaggaggcgtccttgccctattactatccatcctcatcctagcaataatccccatcctccatatatccaaacaacaaagcataatatttcgcccactaagccaatcactttattgactcctagccgcagacctcctcattctaacctgaatcggaggacaaccagtaagctacccttttaccatcattggacaagtagcatccgtactatacttcacaacaatcctaatcctaataccaactatctccctaattgaaaacaaaatactcaaatgggccct

SEQ ID NO: 299 - DNA, 1051 bp, Homo sapiens
gggtacctgtaatcccagctactcgggaggctggggcaggaaaatcgcctgaacccgggaggcggaggttgcagtgagccgagattgtgccactgcactctagcccgggtgacagagagagactctgtctcaaaaaaaaaaaaaaaaaaaaagattttatattactttctgtactgttttattttcactgtggtcatatctgccagtcctagatgctatgaaccttccatgcaagaggtctaaaagttagactgttctttaattatgccagtaatccagaaagtcattatatttcaaattcagcatttaagatagctgaaaaagaacatcactacctccttaattctctcattggaaatttagttttaattttctgatgcttaaaactttctgtgcttcagtttttcctttttataaatgtttgatcatatttaccatctccctaattatggtagacataattatcataattaggtctagtcccagacagtggctcaaatgtctgcgtagtgctgtaaagattcagagaggaagtacatgtcacaaagtgcaagatgtatgacatttgggagaattagtcactttcaatttgtaattctcaaaaggcagaatattacagaaatggaaaacatgagtagtgtcctctttccgttgtgagcaccctgcatcctggtggcaggctgtatagcctgtaggaagtctctgctgtaagggtggttagtgttccttcctgggcagtgttctgatttgcatgtttgaattcatttgttgaaagctgacctttgggccgggcctggtggcaatcccagcaccttgggagggatcacttgaggtcaggagtttgagaccagcctggccaacgtagtgaaaccctgtgtctactaaaaatacaaaaattagccaggcgtggtggcaggtgcccgtaatcccagctacttgggaggccgaggcaagagaattgcttgaacctgggagtcagagtttgcagtgagctgagatcgtgccactgcacaccagcgtgggtgacagagcgagactctgtctcaaaaat

SEQ ID NO: 300 - DNA, 1669 bp, Homo sapiens
agaagttgtgaagttatagctccccatgttttttgtttgttttcctcctgtaagaggggactacgtgaaagcttccatattcactgatattattttatctggcagcacatgcctttcccagtgaatttgtcattttgattccagcaaaatctgttaaagtttttagggaagaaaaagagtatgaagctgcataataccactattaagtctaaggccatctttaagtcggtcccgaatcttactatactaataatctagatatttccaccttgacaacgatatagtatttatatatttttcactatctgagatagaaataaagctttattgataaaatatggaatgaaaacaccaaggtgtgtttgcatatatagtgaggcagtgtgccttctacatagtatatgttaatctttttaaagcatggatttttcatatatgccagtatgtctactattgtagaagattatgtttttaatgcctattaaaaaaataagtataatccaaatcttacctcttcaaacatcactaattctctaacctaaacccaatttctcagccacgccacccaaatgttaatttctggagaagtggtgttctttctgtcttagagttataggttcttttcttatttagaggttattgtaaggctagttggatttttatctcatttgtcaatgatggcatattaatattttgttaaacttttcagtaatacatgaaggtaaaatttcaacagaacagtaaatcaaactgactttggtaacattacccaacaacctattcttcctccagagtaattttcctattggctgtagaaaatactactttttcttgtaatttgagaaattatgcttgcaataatataatagcaaatcaaagatctgtatttttctgtatgttagtttgttgttgatttttaagcaaacacatcaaatttatgtgtcctaattggggtattcagcatccaactttacatttatacttcattaagattgtttgttttcctgttgtttctcagcaaaaggatattgaccttattcaaaaaatgtaaggcttttcatggacatgagtataaatcacatatacttttgttgtccctttctgttaactatgaggctcaattatccatcttattgttgcgtaagtgagtgtgtgcttcacagcattttattacacacactaaaatcacagtaactgcatgtacagctcgaacctttgatttattcattagtttcctccaatttatattataaatctttctttttaaaaatagtgattaactttttttcaagtgggataaaagtaatatttatagaacagagggaaacttttttacatctcaagtacaatctatgtaactcaaggttttccaacccatcacctggcatttaaaagtgtaactcattttatgccattttcattgttttctaaataatttatacagtatcagttagctgtctacagatatctgggagcaaaattttccccaaactcaactactcttttcaatctggttacttcagtcaatgtgaacatatttctcattaaggttgataatgaagacaacaaaataaattttaattgtataatttatcttcatcttacaataaactactaagaggaactctgggctctgagattataataaatcaggaaaaatttaatattt

SEQ ID NO: 301 - DNA, 2154 bp, Homo sapiens
cgtgtctttttacccccaagatatctgtcttcactagcgactgaatctgccactctcagaataagttccttgcatttattccaaataatctcgtttactctcacctgtttatgcaaattgtataaggtttcttatgcccaagcttgaaaaatgatttcccagtagacaagaggcggctacctatcctacagtgacggtatttatttacataagaagatcttacaggagttctttgcttgaatccgttctaacacccgcggcagctgcacgcgctcacagaaggtggaggttacttgcccaggtacagacgacctcggggcagtgacgagcaaagaccagagactgctgagccctcgcatctgggtggcggaattgcctgcggggttttgcccttggtttactgaggggggtcttggttgctgctgaagccccccaccccttctaaagtgcaatgcaaaagggacatcatgtatatgcagcgtttgtttggaattttctttgcttttgttttctttgcggttgttctgtgtgcatggattccacacctctgccgtaggtagatccgtcagcgggcattattaccgtgtcttgtaaagggtcggttttgttatgcaacacgcagaatgctgtttttagccttgttttaccagagttgttttttttttcagttatttcttcaagggaaactaaatgatttagttggagcaaagctttaagtgtgttggcgtgcttctgtgtggctgtcctgtgtcgccaggtcgaagatcacagtgaggtagaggccctgccccatccccagggccgccaggcttgctccgtttgctttgagtttttagaccccagagggagatgagcttttccaagctgtgtctgggccagagcctctccttgcccttgctccatcccgacggtcaccgttgggtccacgcctccaccgccccatcttgccccaaacggaaagcgctgtatctgcagtggcagcccttccccacttcggctctgggagggtccagccagtgtcacctgggcccaccctttcctgcagctgccaggcccgtgcggtcagtgggacccggacgtgggcaggcgagctcgggaccctcccaggcagttcccacagctcttgcctcggctcaccagggtcacttccactgtcaggggcctgagggggcagctgtggctgcagggctgctctggactgaggggtcccaggccccgaggggtgcacgcctggctccccttggcacaggtgcgagtccgtttcttttcagcagaagggggaagaggtgtccgctgtgtgggctgctgactcctctgtgtgtgaggcccttcatctaagtgattgtgtattcagtttaattctcattatatttctatactgaaagaagatttttaacgaagggaaaaacaacagcaataacattcatatctctggagcagctaactcatacacgtaatgtctgcttttcgtacagaactagccaatgtaaaaacagttcacctgtaaatactttttcctttttcaccgttgtattatacatgtatatgctgggtcctttttcagaaactcttttcttacctgagagttgtcttgttttctgggctgtttttaactgaggaaaaaaaaaatgctttcctgccggggggcaggggagacggagaaacccatgtgcgtttcccatgtgaccccctcctccctgtgggtctgagccccggccccccccaccccctcctccctgtgggtccgaaccccggccccccccaccccctcctccctgtgggtccgaaccccggccccccccacccccctcctccctgtgggtccgaaccccggccccccccaccccctcctccctgtgggtccgaaccccggcccccccacccctccctcagcccaccagggtccagggagatgttcgttctcgctttaagtcaggagtcacaaatgactttttttttttcaattaaggaaaaagctccatctctacctttaacatcacccagacccccgcccctgcccgtgccccacgctgctgctaacgacagtatgatgcttactctgctactcggaaactatttttatgtaattaatgtatgctttcttgtttataaatgcctgatttaaaaagaaaagagcttggcatatttatctat

SEQ ID NO: 302 - DNA, 5770 bp, Homo sapiens
cagagcattgcccaggcagagttggtttgatgtggccagatgttttgagttatttcccttaagtgtttcactggggagagaacagggagtgctcctccagcttcccaaagaaatatgtttttgtaagtggtaggaacatgtgcacacaatagaacatgaaataagttttttaacttgtaaaacatgtcaagatttttccaccaagctagaaaataaaaaacttagttctaccacatccaattaacttacacacccccttccctgtctcaacacctgctttgaccctgcttttctattattacatcagtcagcatcttgtggtccctaacatgaggatgtggctggctcgtgggaaacagcaaaacactaagcctgacctctcccaaattgggaagaccagaggagaaagtgcaaaactgtccccatttggaatgcccattccttctagaaagcagttggacagtgctcctctgcccttcataaacagactactgttgggtccctgattccaggctggcctgtgaaggattgccccaagtgtcccctttcacggttgtcacatttacagtgacttctgttgaacacccctcttagggatgtttcttttgctcttatttcctgcatctttccttaagggaagccccatcctctcccaggaccaggagtttatgaccaggcgagcacaaatggctaaaagccaagctgtcctagaacttcagtgggagagctgtctggttcatattctacccaggaatggtacttttcagtgcagccaggagggctcttgggatttcctttccaaagcacaaaaatactgggacccaagaagaacagctagaggacaactctgttggcacagagacggggacagcccagtctgctgacctcacagggtcagctgggcccccctggtgcttcaccacctgcatcctcttgctcagaatgcctttgcagttgagttttctgggtttctatgattgaccttgaggtttactccttgctcttacaacatttctaaggatttttaaaagtttacttcttgtcttgttcttctaaagctttctccaggacagatattttccctgtcttaaccactggtccagtcatcccagtgggcttctctttgtctctcccagattagacctttgggtgagattggcatcacaacatctaatctgagtctgtcttttgtccttcattctgtatggcagtctccctttgttataaaagctttctaaagcatactaaagaagccttcccagagcccgtcttgcttctcttccaggtgctctatcccctcgagaccctctggtgccaggcttgcttcacggccatcttgtgttgtcactgcagagtttggaggccagttttccacagcctaaacagggaggagctgcagaatggggctctggtctctgggcattcatttccctcatagaggctgagaataaaacaaggacttattcacacatgttctagaaccccagaatggcccaagttacctgagaccagggtttctcaaccttgacaccattgacattttggactgggtaattctttgttctgcagagctgtcctttgcactgtaggagatttactaatatccctggcctctacccagtagtaccactagcacctattccccacccagcgtgtctccagatattgtcaaatatcccatcgggtgcaaaatgatccctggtcaagatctgttgcccaagatgttacaggtcacaatgaccacatttgaaattgttttccctttcattttaccctgtgaaagcatctctcctagagccttgcaagaggcaggtgacattgtgtccatatttcttcctgtttcagaacttctgtttcacaacaatttctctctcgctacaagtattctttcactcagcactggggaagttgggaacagctggtcaccatcatccctttaatcaactcacacctgtttaaagagtgtttctgatttgaccttcatcccttagtttactggggttaaaaaaagtctcagcaattttcattatttctcgtgggtctcattatcaaacctttacttatttcggcatatttcctctgggcttcttctagtttctgccttacaagcaatgctgttctgtaaatttattgaaaactctggaacatttcacctttagagatggaggatggaaggattggtaccagaagagggctaagatacgttttctgtcttgagctgaaagcacagtctactctccttcgttttgtcgatgagaaagttgaggccagaggggaggtgacatgtttagagtcaccccgctggttagtgacagaaaaagcgtgagagttgtctaggattcctgccactttggtccctggcctctcctgggggaggctgctgttcttaggtgctctaagcttaatccctcagaatgtgtggacaggtcagcttagaagagatggggagattcaggatccccctgtgccagagcacagcctcaccggatgctgcttcccacactgaagtgtcctgtccgaccattgctatctgaggcatccacaagcaggtaggaaagctggcgagccattttacttcctgaggacaattccccagccacaggctctgagtcaaatttctatttggtaagcatcctagcagcaaagtcctgcactcagaccagccaaaaaacagcccccattccaagtacttggtgtcaaaagtccccgaacgacttttaaacccaagtcttcttaaggtttcagtactgtggtggctttagcagttgtttttgtgcaactataaattatttaaatcatctgagatgacagtcaattttacaaaccaggtacatattaatttgtataattttgtatatgctctggtacactacctgaactaacgaagggtagaactaattctgtttgtcagtgttcacacctgtaacattaggaggatatgtctgcattgcttatttctttatgttggtgtttctgtggcaaagccctgcacatggcatttctgaaaagccttaaatctttaagatgttgcatgtagggtatgcagtgcaaaaggctgcctcagaactgtgagcccttttgtaagctggaagcatttctcttactactgttacttttgtaggaagttttcaattcagagctgccaaagtgttcccgtaagcagtgccttagtaataccttagtcatgccgccagccttttcttacaccaattcctaatgttcatttacgaattggcccaatattggaaacaaaacaagcaaaaattgtcttcatttttgttttgtaagcccattttttctccagttctataggaaactgactgcttggtgtaaaatccgaaactggacacaagtcagttctttcaccacactcaaatgtatataccaaaacaaaaggttgcaacttcatagtttactatgaaaagcaaattgtactttttaatgttgccttttaaattcatgaccaaatacttagctatttgtgaatcttctgcactctagcatgaaagtgctttggtttgagattccagcttagaaaagtgctgccataataacgataatttgtagagagaccaaaaatattttgagatcaccgtaatgcctttggtttaccgggatgagtaaccaaccacaggcctctgttcacaagagcacgacgtggtccccgcctgctgctagtctgtctgccactgggggcctcccaacatccatagcacacttcagcggaaggaccccagaaactgttgtgtttgtgtgtgctgatgacctagtgtgtcatttcacctcgtcacccagccctgcgtccggatgaggggacttctgcacaaatgacagaatctcggctggtggacagatactacagctttctcctcctccttgtgttcgtgttcagtctctgtggagactttcttttccattcaaatgacagtgcgcacttatctggtttacacaatgataccattttgaaagttggaagcctcaaactgagacgacagtgcagaacaaaacaaaagtgagttagggtcgttaaaattgaagtgttcttcttagggcaaacatgttgactccgagtattgtgtatgaatgtgctacgagaaacttccaaagagcaccattcacaatttggcattttcaaagaatgttccagccctcaaaggggcaactctttaaagtccttgttggcttttatccaaaccttgtagaaattgggaaagctgatagaggtaaggaagacgagtgaaaaggacaagaaggccaaacaccagccaaaaagaaactaggaaaaaaagattttctttgctaatatagatgtaaaaataacatcagacatctttgaaaattagcctctaaactcttaatacatacgttctgtgtgtctctacctggcgtctttaagaatatcctctctgggctctgaaattttaggagtgattcttatccactccaagttgtaagtatttgtagaaatttgtgcaaacaaacaaaaactatcaaatgaaaagaaaatgtactcaacctaacttatagttagcagctggaattctcaactcttccctgccagcactataccacagtgtggaagaaattagtcaaatgcttgttttcctgcttctcttttcaactgttactgtgctttgtttgaaagtagttttctctctcaaagccgttgcttatatcgttaagaatgaaggtttgtgtttaaaatttattgcattgcaaagggtagtttcactgaagtcatgcaccattaaataagatgaaatatttgtatttattgtcctacttcctaagccgtaacttcttttcctctgtgaatttgcattgagtcactcatgctacactacatcgctttagtatttgagatggcatttatgtttcctctcgtttatcatgaaatggggtcagattccatcagattccacctctgtcaggtggactcttgtctgccttccatgatgagattttttttctccttcccctttctttaagagaggctgacagatctaggtgtcaatcaattggaaaccagtctctgattttttttcattagttattttctatcattagtttcactgtgtaaattagatatcaactgcacttctttaaaaaaaaatacatctccctatgacctccttgaaagatttacttctgtaggcctttttcaataggctcatgactgcagacaaggaaaaaaaaagtaaaaacaaaaacagtatgtgcctgaaaatgacaaaaaaaaaaatttgtaacatttaaaaaagaaacctgaatagcctttaattctttaataatacacttaaattttatgtaaatcggttttcgccacgtgtgtttgttcacattctaaatgacttaatgggattctcacggtctgtgtctttgtgtcacgtgtataaaatgggcttgtgatgtaagcgtttcatctggtcagtggttcctttgatattgtactgctgctgggagtgggctgtggaacctgccttcgggtaactgggttcctcttgggtagattggagagatgggggtgggcgtgggcaaattctcacacatgttttcttaacctatttgcagaaactttcaaaaggcatttgattaaacctcttggcagtacagtattcttgtatttgttaacgtctgtgtttaggtactggtacctttttgttttaaaatgttctaagtgttggctttaaagtgaatttatctttagtatgatagttatatgaaaattataggatttgtgtgcagagaatttttttataaagtgctttgt

SEQ ID NO: 303 - DNA, 798 bp, Homo sapiens
attacaagtatgagccaccttgcctggcccgttttttcttacttttagtaaaaataacctcacgtaaactgtcataggtgtctgtgggcttatttttgatgttctcctttgttggaaattcttgtgaaataccttccaggtcttagtctttgtgaggatcaggttctgctttcaattggatgttttaagaattagttttaaaataatttgtttttcttattattagcaccctatgtttagttgctgtacttatttggatagtgtggtaagcacagtggcttagcatgagaaatataactagagatctcataattttatgtgtttataaagtgttttatttaaaaattaaataattgcaaatgagtggataaagaaactgatatatatatatctgattatatatatatatatctgattatgtatatatatctgattatatatatatgatggaatactacccggctataagaatgaatgaattaatggcatttgcagtaacctggatgggattggagactattattctaagtgaagtaactcaggaatggaaaaccaaacatcgttatgttctcgctcataagtaggagctaagctataaggatgcaaaggcataagaatgacacagtggcttttggggactcagagggaaagggtaggaaggagatgagggataaaagactacaaattgggttcatgtgtactgcttgggagatgggtgcaacaaaatctcagaaattaccactaaagaatttactcgtgtaaccaaataccacgtattccccagaagcctgtggaaat

SEQ ID NO: 304 - DNA, 1279 bp, Homo sapiens
aaagatttctttaaggatttggatccgatatctttctgaattaggccctaaattattatgaatgtgaacctaggttatatgtcttgcctgtggtatgtgtgctgcgatactttgaagcagaatgatttgtggatcattttaccagtcctttctcttttttggtcaaatgcagatggcatggaggaaatggaaagttctaggcatttttgcaaccactactatataactcttatggaccgcataaatttagtagacaaagtaagtggttagtttcttggacctcggttttctggtctgtaaaatcaagagatgcatcaaagtttctttctagctttaaattctgtaattctttctttgagaattgtgtagcatgtataatgtttatgggaagtaaagtttaagtcactaaaaagaggcagaaatcaggttatcactcacagggctgttttttcagcctagtctctgccaatcctaaccttgttaaaactacaatgtggcaagagatgatgtcccattattatttctttcactcgagaatgcttcagctatatagatctatcaaagcagttgttacactggtgagtttccccatatccatcagaagaagaaaatccatcacacttttgactactttttcctctccaagaaaatgatctttaagagaatgacatgtaatatagactttactattcttgaggcattggagaaactgcatctgaaataaaatcaatacatgatgcagtggtgtatgtacatttcaaatattgaatggcaaaacattttatcaaagactttgggactaaatacccgtcgcagacttacataaagttggatagaatacagttgaaatacgagtgtacctcctgtgtatataatacctagtcgtggttcagttactccatatatctcaactaccctaacagaaagaggttgactcattacaagttgagaaaggttgacattagggctggtatgtttagaaaatttgtggttcttttttttttttttttttttttagagttccatcccagaatctcagtttaagttataatgatggttaccagggcaacttagaggaacaaaagcacagtctttagccttcatatttctagctgaggaaagtagacaaataaaacagaattctgtctcagttatgcactgagtgtgtgtgtgtgtgtgtgtgtgtgcgcgcgcgccagtgcaagaccgagattgagggaaagcatttttgctgggtgtgaccatgtttcctctcaataaagttcccctgtgacactcc

SEQ ID NO: 305 - DNA, 1398 bp, Homo sapiens
tataattaagtgatcttccccctccgtttttcctaaaggcttcttcaccagtttggataataaggccctcgtggtgtgttcatctacttacctgaaataacttggaataaataatttcgattacacgttgaagatacaatgagtgactgtttgggttttccagtgtgattcattttcatttttgttaaaataagacccatgctacattgatgtattttagtaatgccgacttcctgggattgtatgttctcaccattttaatagtttatagtctggggaagtagggcacctttgtctccccgaaaacatggtgtgggttgggtggtatcatgggagttgatggcaagcttcccaaatagttgagagttctagaaatagttagcatttacctgtgggggaggggctgcaggaagaaagtatgcctgagagcagttaggcgtgtgatgtgtgattaggcttcttgctcttaaatccaggttttcttgtttggaatatgattttttttttcaaccctatcctgcactgagatgtatgtaatcgcaatcattaaattcataaataactactattttttttgacgtttgagttgttggaatccgacctacaggacaaaatactaaactgtatgggggacgaaaactacgtgcctgggaaaagtttttcttattgctaaggaacttaataaagtgacatgttaatggcataaaaattgttgcaaagctcaccgtcagtttatgacatttttcttttaacgtataccagctttgggtattaatgtgggagacactggtggtaaatggagtgaccccttgcagagatgatatttttgcattggttgcttcaaagaagtgttaagcattttaatacgtatgtctaagaatctttttgatatttgtattctcgacacctaattaaaggttttgcatgattaccatgacaccagtctcccgaaagaattagaggtaactgcttcctgtgttctaggagcctttcaagctaacagaaggtaatataaatataaggggtactgataaaaggaaatgtattaatagaccttttgaacatcaacttgttgattaaatctatcagtgcagtatatatacaaccttgtcagacgagtagctgacaaaggaatctccctagtacaacttgtagcagtactattataaagaattcctgacttgacacattttgatgaagttggttgaaataatttgttgggtttgttcaatttttggtgtcatttatataaaaagaataaagaagaatgtgaatggtaggaagtcaggggagaggcatggcagaaacattggtattcactagaacttgtatttttctagtgcatgtgaattggactcatttcacaaataacatttacagtataagtcactgaaatgc

SEQ ID NO: 306 - DNA, 896 bp, Homo sapiens
gagattatgttggtttcaagagcacaaggtttatttttcagtaaaaatgatacatcattcaaatttatataattttgttaagttagtgactgaattttaaagttctctttcaatagtcaatagttttgtaaaaataaaaccagattttctccaaattttctctaatattttactctcaaaagcatccaagacatggtccacagtacagatgtattttcagtggtacaaatatgttaaatactgcctgcgtgactgatcaatctgcttatgaagtcttttctatattatttctgctagattatgagaaatgccgtgatccaaaggtttaatctattaattaaaaatagaagaactaatattaccattaatttacttctattttgaatgtacgtctacaattatcctgtgggagaaaaagtagttttagtatcttcacaaacctacagtttttaaaataaattagtttaaataaatttctataattctcaggatgatctcacatttaatgaacagactatgttcaatatggaaactcaagaagagtacttatgttaacttggattggcactcggaagaaatctaactttattccatttgttttagcactcaatttgcatagcatgggtagaataaggcaaattctttttaggaccatattttaggagagttgtcattccctcaatttttaaaagaaattgaacaattttctcaatgtagatatttcttattcatacaacattatatgttgttgtttaaaataggcttcattgataattatgaaatgtaattttgactaatgcctttattcaattgtcatgtatgtactgagaaagttctatgtatcagtagactaagaaatctaattttgactaatgcatttattgaattctagacct

SEQ ID NO: 307 - DNA, 2232 bp, Homo sapiens
gccgctttttttttttttttaagttttcaaaagcatgcatgatggcttctacctttctatcttccctggtcctcctgctatgagctaggttctcctggtcatctataacctcttcttcctcttcttctggtttttcttctggattgtctacttcctcatgatcactggatacagttactttttctggaacttcttgtgattgctggtcattattctcctctgaagcctcattctgctgccccatctctagctctttccgtcgtgcttttctacgtctagtctctgctccaatggtgggtaggcttggaggaggtggtaggagtggcagttctgtagcattaggattccttttttgtataggacaattccggtttcccttgtgacaggcacagtccactttataattacagttactatactcataatcaaatgctatggtgacctcagcatccttggtgatggcagacacagcatagatgcacaggtgaatcatcccatctgcaatcatgtgtcgcacctctgcatttggtgtacatgatcttctgatgaaccgagcatcattaccgaaagtacgggcatccacacacatctctacaccattgaattttgagtagaagagcacaaaggggtatggttttttgaagaaatgcccattgacctcaaattgctgtcgtaacatgactttcccacgatactctattataagagtgtccaaagccaaatctcttgcagccctcaggatcttccggtgcttttgaacacgagtgactcttcccagctgtaactgcatttgggaaccaataactgtgttattacaggccaattcagtcttattaatagtgtctaaaatagtaggtttgcccacaaattccttgctagaatgtaggtgttgttcaagcgcgttctgtacatctgcactgtactgattagtgaaagcttcttcatactggtcagtccatagtcttatccgattttcccagccctcagttgtattctcatctaaattctgtgcttcagagggagaattcttgattttcttcgtctttggtgctgcacgacccttttctggactctttttccgcttcttgggtttggttcttctaacagttaaggtgatgcttgtaggtgtgtgctgtgttgctgtatacaacacagtggaaggagaaagctcctcatcccagctttctgttgcactgctatccccacctgatatgttgtcctgcttccgccgatgaagtctaataaccttcccctgctcattcccctgcacttgtcacagttgagaaggaagccatcctgagaaagaccacaaggacaccaggtaggtacagtttctccttcagagttcgggctgtctccacagcgttcctctacaggcgacggcaggccattcaggtcagaacgagggatgatcgtagcataaggcagtcctcgacacccatgcctctgagtggtcccataattatgagtggaatacacgctcttctcattaactgctggactagcctccacagattcagggcagctgagcggggagtttcccctagagaagccactctgggctggtttagactcagaactattcttcttaattggatctcttaatacttccatgaaacctcacatgacatttgcagtgagtgagatgatcaaagtgccttctgcactgccccagggaccaggccctcttccattcactaccaagacaggatacctctgatccagcagccatatctgagtaggatgtatctgatgtggtgactcccagagggattgcaatgctcatgacgtccaacacagcagagattggaaatcacggggtccaattaatggagactgaccactctgagagtgggggtgagctgcagagcctcatccaacatgttatggacatgaggaatcctttatatagacttctgaatatgaagtccccccaaattatctgctagtagttctgaagaccttgtcccaggcgctgccggggcctgggcccgggctgcggcgcacggcactcccgggaggcggcaggactcgagttaggcccaacgcggcgccacggcgtttcctggccgggaatggcccgtacccgtgaggtgggggtggggggcagaaaggcggagcgagccaaaggcggggagggggggcagggccagggaaagaggggggccggcactactgtgttggcggactggcgggactggggctgcgtgagtctctgagcgcaggcgggcg

SEQ ID NO: 308 - DNA, 654 bp, Homo sapiens
cgacaaagacaagaagaggtgtcttgtggcaagtttatgcaagatccttccttggttggacatactgggcttgataatcctgaacaaaaatcatctcagagaacaggcaaaaaattactgaagactttaacagcatctgaaatgctacctttattggatcattggaatactcaaactaaaaaggtatcactcagagaaataatgtcagaagaaattgccttacaggaaaaacataatttgaaaagggagacccttatgtttgaaaaagattgtgccactaaactaaaggagaagcagctctttaagatatttccagccattaaccaaaattttctggtggacattttcaaggaccacaactattcattagaacacacagtgcaatttcttaactgtgttcttgaaggggaccctgtaaaaacagttgtagcccaagagtttgttcaccaaaatgagaatgtcacatctcatactggccagaagtctaaagagaaaaagccaaagaaattaaaagagactgaagaaacaccaagtgaactgtctttccaggactttgagtacccagactatgatgactacagagcagaggctttccttcaccaacagaagaggatggagtgctacagcaaggccaaagaagcttatcggataggg

SEQ ID NO: 309 - DNA, 610 bp, Homo sapiens
atcaaactcccatatgttgaaattgctcctcatattactggttttacatggacacagaaactaggcactttagaggtgcacttgcatggcaggctgggcccccttttctatattttattttcctttttagtatagtggtacttaaaatcactggttcacttaaaaaaacaaacaataaaatgttaaactctactaatgtacaaataagctgaaaagttgcattttatgtgtattttttgccatagcaggtactgtatttctcatgctggatttcaaaaaaaaaaaaaaaagtatcaaaaacaaaaaaaactaaagggtggtgtttattggattgtgacaggttgagtaataaggaattaagtcgtcgtcatttcattaaaactgagagatgatgtaatgcatatataagagttttctgaagggttttttttgggcttttaaacagcttatttttgtttttgtttagtttttttattttattttattttggaaagatatgattgtattatgtgcaactcagttgcttacattataactacaaaatatttttgggttcctggaaaaaaaaaaaaaaagaaaaaagactaataaatgtgtttggctgctaagc

SEQ ID NO: 310 - DNA, 1064 bp, Homo sapiens
cggtcccttgcagggcggtggggcccgggccctggacctactccggggcctgccgcgtgtgagcctggccaacttaaagccgaatcccggctccaagaaaccggagagaagaccaagaggtcggagaagaggtagaaaatgtggcagaggccataaaggagaaaggcaaagaggaacccggccccgcttgggctttgagggaggccagactccattttacatccgaatcccaaaatacgggtttaacgaaggacatagtttcagacgccagtataagcctttgagtctcaatagactgcagtatcttattgatttgggtcgtgttgatcctagtcaacctattgacttaacccagcttgtcaatgggagaggtgtgaccatccagccacttaaaagggattatggtgtccagctggttgaggagggtgctgacacctttacggcaaaagttaatattgaagtacagttggcttcagaactagctattgctgccattgaaaaaaatggtggtgttgttactacagccttctatgatccaagaagtctggacattgtatgcaacctgttccattctttcttcgtggacaacccattccaaaaagaatgcttccaccagaagaactggtaccatattacactgatgcaaagaaccgtgggtacctggcggatcctgccaaatttcctgaagcacgacttgaactcgccaggaagtatggttatatcttacctgatatcactaaagatgaactcttcaaaatgctctgtactaggaaggatccaaggcagattttctttggtcttgctccaggatgggtggtgaatatggccgataagaaaatcctaaaacctacagatgaaaatctccttaagtattatacctcatgaattcccgtccaaggaagcagagttgttaaagagtactggaataggggctgaaggatctatattcccttattgcattttccttatgtataattttccagatggtgatgttacttttcagtgtactcatatgtctcattttcatctaaaattaaatggcaggatacaaggactgcatagag

SEQ ID NO: 311 - DNA, 1297 bp, Homo sapiens
aatggacttgtaattcaaatgctttttatgctcctgatgtgtccattttagttcctaaagaaactggatgagattaatttttaaacaaagcaaagttaacagaataatcaagtaactcttctcttcttttaaatagacctgtcttttaatgaggcaacaacatgaagctgcggctttaaatgctgtccagaggttagaatggcagctcaaactccaggaacttgatcctgccacctataaatctatcagcatttacgaaatccaggagttttatgttccccttgttgatgttaacgacgactttgaattgactcctatatagcagtcagtacttcctgatggtattgtcctaaactggtgatgctcaagcattatactgtggaatactgccttttgacaaaaatactcatgcctttacaattgttagtaaagttcgattatagttggttatgtagtaaacactgtcattttataaaaaatgagaattattttggatcttagatccaaacacagtttctaatagaaaactattatttatattgggaaaggtaactattgcattagagcatgttggcagactggtaggtatttaaaaagttgagaatctgctaacagcgctggaagttgttagcgctctaagtaataagataaccactagtattcaaatctctttcaggttttattaaaaaatatatatcaataaactaaaaggttcaattcctaccaaatagtttctaatgtgggagaagaacttggcacaaaatttcttcagtttattatctgtaaattgtacagttttctttttgaaagatttaatattgtcttcctttttaataacttattgtacacatattgtgcagatgtaaatcttgtaattaatggtcaaactgtataaagggattggtagtccaaacatgtacaaagaaatacctgtatcactgttttgtctcatgttttattggaccaaagttgtggtttgtatggagtgtagtagtagtgtgtacaggtagaaaacttttaaatacagcatgcaggtgtttcagttagcttgttttcatcaccataactgcaaagatgtggcttagttgtattgcatgcttcctataatttaactctccataattgatgcctgcagtagtgtaaggcatttcatactagtctcctctagtagacctgtgacttactgtgttggacatattatttagacttagtcatacaaagaaacttagctcttttttcatctcacagtaaagcctatttccccaggaaaaaaataaatgcctttgaatgaaaattc

SEQ ID NO: 312 - DNA, 1354 bp, Homo sapiens
tgtttgtggggttacacgcgggttcaacatgcgtatcgaaaagtgttatttctgttcggggcccatctatcctggacacggcatgatgttcgtccgcaacgattgcaaggtgttcagattttgcaaatctaaatgtcataaaaactttaaaaagaagcgcaatcctcgcaaagttaggtggaccaaagcattccggaaagcagctggtaaagagcttacagtggataattcatttgaatttgaaaaacgtagaaatgaacctatcaaataccagcgagagctatggaataaaactattgatgcgatgaagagagttgaagaaatcaaacagaagcgccaagctaaatttataatgaacagattgaagaaaaataaagagctacagaaagttcaggatatcaaagaagtcaagcaaaacatccatcttatccgagcccctcttgcaggcaaagggaaacagttggaagagaaaatggtacagcagttacaagaggatgtggacatggaagatgctccttaaaatctctgtaaccatttcttttatgtacatttgaaaatgccctttggatacttggaactgctaaattattttattttttacataaggtcacttaaatgaaaagcgattaaaagacatctttcctgcattgccatctacataatatcagatattacggatgttagattgcatctcagtgttaaatctttactgatagatgtacttaagtaaatcatgaaaattctacttgtaactatagaagtgaattgtggacgtaaaatggttgtgctatttggataatggcactaggcagcatttgtatagtaactaatggcaaaattcatggctagtgatgtataaaataaaatattctttgcagtaaaatattccctttgttaatgttatagaaggggggatacaaaaaggaactaacaatttgtatggcagtgtcagatatttttattttagtatttcctgttttggtttatttgcatcttagaagagcataatgacattgtttgatgaagcctaattatgctggactgttttgacctggtttaacccttctgataggtagttgtggatgctggggatgagaactgaataatctttgcctggagtgacactacactctagaatttccactttggagaatactcagttccaacttgtgattcctgatagaacagactttacttttctagcccagcattgatctagaagcagaggaatcccagcgccttttaaaagttgttatgtggttttcttttaaaaagctcctgtttttggaaagtagaatttatgggtacaacgtatgttcattatttgtacataaaataaaaccatttaaaaagt

SEQ ID NO: 313 - DNA, 994 bp, Homo sapiens
ctttttttttttttttttagcaagagattttagtttttatttgtttaaagagtataggtggtggtttcaagaaaagacttttgctaaaagcagctagcaataagattatggctatcaaaccagtttctttcatagaaagtgaccattccttgaagtgctactgtttttgaaagtttcttagaacagtctcagcattctaaacagtctgtacttctacatatttgttgttgccatcttgggcaggaaaatccctaataacaggaaacagaggccgggcacggtggctaacgcctgtcttcccaccactttgggaggctgaggtgggcagatcacaaggtccggagtttgagaccagcctgaccaacagggtgaaaccccatctctactaaaaatacaaaaattagccaggcgtggcctgttatcccacctactcaggaggctgagcaggagaataccttgaaccagggaggcagaggttgcatgagctgagttcacgccattgcactcagccccggcgacagagcaagactctgtctcaaaaacaaacaaacaaacaaacaggaagcagagagctttttgaaaaatagccttgatcaatccaacaaatacagtattcagaaacactacagagcaacaaagtcttctcataagagtcatatttatagtatttcttaacagaaatataaacctaagaattccattctctagattcaaaagattggcttgctcataaccaggtctcagcgcaatctgtccccaatatatttaaaatgcagttataaattcaaaataaaaattcgttttaattttaagaaaaatgtcaagaattacaagccatattaaagcaaactagttagcaggttatgattccattacaattacaatactgttgtgcagaacattactgcgggaacatgcagagtacctttttaaaaataacttcccttgagtgtatttgtttccgttgaagttgtcccgattgaattctagacct

SEQ ID NO: 314 - DNA, 795 bp, Homo sapiens
tttaggtctgaaaccataccattagaaggtgtttagagatgatctagataaggaaatacaggaccatttggtcattctttcattcaccagacagctatttagcacattctgctagtggctccgcaggatatatctgatttaaaaaataggaaccacaataataatagctgcttatgcttatggagcattgccatgtgctagataggcaccatcctcagcccttggcaggtctgagctcctttatttcttccaatcaacactatgaggcaggttctgtaaccccccttagggttaggccactcgggaaactgaagcacagagagtttaagtaacttcctggaggtccgacgcgtaacatgtggaggtgctgggattcaaaaccaggcaatgtgggtcccgggcactcttgaccagtgcctgtacttcttccaaggaatagagcaagggaggtcataccgaatatcacagtgtcacctaggaagcccaagggaggtattcccgttaatctgcagccaaggctgggcgcggtagctcatgcctgtagtcccagcactttgggaggccaaggcggatggatcatgaggtcaggagttcaagaccagcctggccgagatggtgaaaccccgtttctactaaaaatacaaaaattagccgggcgtggtggcggacgcctgtggtcccggctactcgggaggctgaggcggagaactgcttgaacctgggaggcagaggttgcagtgagctgtgatcatgccactgcactccagcgtgggtgacagaacgagactccatctc

SEQ ID NO: 315 - DNA, 1526 bp, Homo sapiens
ctcattttgttgtccaggctggaacttctggggtcaagccatccacccgcctcagcctcccaaagtgctgggattacaggcatgagccactgcacccagcctgtttctcttttacactgaaaaatttggttcttagtaacctaatgtagttacttacttcttttatcctactacatatataatagaaccaaaatagtaacgtcaatgtggttattaagatgaagtctactgaatgcagtttgcttttgtttttttccctgaatgcagtttaagctgtatttttatccttaggccaaatatggtcaatgtagtgtggaaagttagatctgtatgtttttaattttaaagaaattacatattttttaatttaatttttatttttttaaactgcacatttaccttttctctgagatgagggggcacatttaaatctgtgtatgtccagagtccgtgaggattgggaatcagtctaaagctgtgctcgcttctcctcttccattgcgatttgccttctttatccagtcttttggaatgctgaacaaaaatgtttttggcacaaggcaggcgtgaaaacataaagttaataaaaatcgaatgcataagctagagcagattatccacagattcttccatctccatatagattatcaccattgcctgcacctgttttccttctccagcctatctgatggaatggtgcttccatgacatgtggtatttggaaggctcttagctctgatgtaatcagggtttgacccatagtcacctgaaatagttcttctgtttctctttgttctatgaactgaagggtctcagaagcccgtgttatgcaaatacccttccatccccttccctctccccttgcctctatccatgttccctcagcctcagggtgcttgcaggctaagaggattgggtctctggcatcctgtagctgaacagctcgtgtcaggaattccccaggcccttgagtctctggggtgagttgtaggggtgtgtacggtgctggggattaagatctgctgagtaggtgcttaccagagttatactgaaggacctgaagacagatcatcttcacataatcagcatgacccataatctgtgatgtcactgagcttcttttatttctgtagtcaaggaatgtgcacaagtaatgcaaatataattacttttagtcctgaggattagggaacttgggggatgttcacattacctgatgatgtcaatattgtgttatgtttaattttttttaaaaaagatccttatttattactgaaataatctaaactgaataaataactttttaaaaaattacattcccactattaggttcctgatgcgtatttggtcttttctttgtactgctggttttttctctccagtattggatgcgttaacggggagccttgagaagttatgaattttggtttgttcggaattgctttttataagttttctgtgacctcatgcactaaatactgatgctaccacactcctgcaagtatgaaataaaagtatgtctcttc

SEQ ID NO: 316 - DNA, 1354 bp, Homo sapiens
ctgacggtgtcggcagagtcgccagcttctgcaggagcggtacctgtgggttcttctgtgacttgtttaaccgcatcttttgcccagtagttagtcttttcctgttgggacaccatgttggtagtttggaaatggtttcttccatccattgcctgccttttagctttgtcgatggtgttctgttgtaaattttggtgcacgtttaatgtgaacaatggttatgagacgagtgccatgagttcctgtgtgcctgtcacccagcccggccacaagaggtgctgggggcagtgtccacacccccctttcttaggacgcctgagtctcagatgtgacttatagggtatttcttatggcaagacggttaaaacaaacttcagcgtctcgtctgtccttctatggctgtggcttctgatgttctaatggcgttctcgtcagccggggctgagaacaaaataacatagactgtggggcttaaacagcagaaacttacttcccatggttctggaggttgggagtcttggatcaccgtgtagcatggtcaggttcctggtgagggtgggattcctggctaacgtaacgaaggctccctctcctgataccgtgtcactgggggtgaggcttcaacacaggaattttggggggacacatcagcattcactccatcacaggtggttagccctttaatccacgggaattttgtttggggttgtgtgagatacgggtctaacgttttctttttcaaatacgtagccagttgtcacatcatttattgaaaaaggaatcttttctccaccgactgacatgaaatgctaccatcatcgtaaataaaattcccgtaaatacttgctgtctctgctgtctcagtcctgactcacgggctgagttctctttctgcacagtagcactggcattaactgtgacagctttacagcaggctccctccccgaggccgttcagaagcattcctcagcgggtcctacacgtttcctctcccatgtcaagtttagaagcagtgtcaagacccacagcagtcctgcgggagttttaagggatgcacggagtttatggggacagtttggaaaattgacattcatgtgacttagagtcctactacttgaaaatggattccagctctcaacgaatttagagctttggcaaaatttttaagatttctttgatgtccgatgtgctcatttcttggtttgttcttgagtattttgtggatttttatgaaatccacaaagtttttgttataatgaatgggacactttcccataaaatgttgtaattctgtattgctgttttagtaaacactgttgattgatgtatattgatgttacacttggtcacttgt

SEQ ID NO: 317 - DNA, 1316 bp, Homo sapiens
gctttttttgtagttttgtctaaatttttaatgaccatttcctggaatcagtttattatactgaaaactgggggtgggagtagggagctagtttgttgataaatagttcccatttccccgtggagaatttgacataccctggactcctgtgtgcctcctgccatccctgcacacagcctggggagaagcctgtgcctccccgtgtggagagaaggcaaccccagatcccctgagctaacccggaggaaaggcagtcctggacagaagactgtcagcagaaggaaagtactggactacccgtgggtaagtcctgccattcaagactggagacacctgggaaataaaaagagcagggcactgctggtgggaagaggcattttaccttccagtgcaaatcctgctcctttgatttaatggggtgtactggggccaggggctgattcacttccttgggagatggtggtgttttcatgaacatctttgatccttccatttcatttattcatccatccattcaacaagtatttgctaaacactaacttaagctaatgctagggtagtgactgagatgtaaaatagattttagaattaaaacaaaatccaagtcctcacacccctgtcatcccaggagatctttccttgtggtggtttctgtgagaattggccatcctgaggacacagccaggacggcagaggcctcctggcctcagggcatgccctgcctaccttctgaaatgtttaccccattgaccaaacttggctccagccattgcggtggtttctagatagccaggcccaccaagagatattgccccttgatgagagtcaaacaccctgcctacaaggagatgttttgaaatggagaggaaaattggcacctcatcttttaaaggcagtaatggaattgattttcagtaactgaatttgtgcacaaaacattctaaacactagtgaagcctgtttcgttgaactaattctggctctggaaatgtttttgttttatagttatttacgatttcgtttgtttggattcaagcttagtttgttaatatgtataatttagcatctattacactcatgtaaatatggagtaagtattgtaaactatttcattgcggggattgtgggtgttatacatacatttaggactgcaattttttggtattttttgtattgtaaaataacagctaatttaagcaggaacaagagaactaagggaggtctgtgcattttaaacacaaatgtgaagaacttgtatataaacaaaagtaaatactataatacaaacttccttctgaaataaaagtagatctggt

SEQ ID NO: 318 - DNA, 787 bp, Homo sapiens
gtgaaaatattctattgtaagtttgttttattaatttattttgtggattacagtaatgcttttgttggcctgttgtatgacaaactatttaaaggttcacattttgatttgtatttgccaacaagcccttttgcttgttaaagctatagctaactctcaggagataattgcagttctactcttagaggatggtgtctttcaaataatgtcttgtctgctgattttcagtaatgttaatataaggcaaaagggatattgtttactatacgtagcaatttttttagacagagtcttactctgtcgcccaggctggagtaccagtggcgggatcttggctcactgcaacctccgcttcccgggtttgagcaattctcctgccttagcctcccgagtagctgggactacaggcgcacggtactatgcccggctaatttttgtatttttattagggacggggtttcactacattggccagactggtcttgaactcctgaccttgtgatctgcctgcctcggcctaccaaagtgctgagattacaggattttttttttttttaagtatgattatgtaccattgtatcatagtaaaactagccaaagaaatttatgaaaggatgaaaaatgattctggccataaaaggtagtatattttggtgggttcttaagccagcatgataatggcgagtttttttcttctcaggaggaaaaaaagcaagagcagaagtcgtagtcctgaacgaaagagaagcaaaagtaaggaacggaagcgaagtagagacagaaaaag

SEQ ID NO: 319 - DNA, 2804 bp, Homo sapiens
cgtcacccatctgtactcaaccatcttagggcatcagattggactttcaggcagggaagcccacgaggagataaacatcaccttcaccctgcctacagcgtggagctcagatgactgcgccctccacggtcactgtgagcaggtggtattcacagcctgcatgaccctcacggccagccctggggtgttccccgtcactgtacagccaccgcactgtgttcctgacacgtacagcaacgccacgctctggtacaagatcttcacaactgccagagatgccaacacaaaatacgcccaagattacaatcctttctggtgttataagggggccattggaaaagtctatcatgctttaaatcccaagcttacagtgattgttccagatgatgaccgttcattaataaatttgcatctcatgcacaccagttacttcctctttgtgatggtgataacaatgttttgctatgctgttatcaagggcagacctagcaaattgcgtcagagcaatcctgaattttgtcccgagaaggtggctttggctgaagcctaattccacagctccttgttttttgagagagactgagagaaccataatccttgcctgctgaacccagcctgggcctggatgctctgtgaatacattatcttgcgatgttgggttattccagccaaagacatttcaagtgcctgtaactgatttgtacatatttataaaaatctattcagaaattggtccaataatgcacgtgctttgccctgggtacagccagagcccttcaaccccaccttggacttgaggacctacctgatgggacgtttccacgtgtctctagagaaggattcctggatctagctggtcacgacgatgttttcaccaaggtcacaggagcattgcgtcgctgatggggttgaagtttggtttggttcttgtttcagcccaatatgtagagaacatttgaaacagtctgcacctttgatacggtattgcatttccaaagccaccaatccattttgtggattttatgtgtctgtggcttaataatcatagtaacaacaataatacctttttctccattttgcttgcaggaaacataccttaagttttttttgttttgtttttgtttttttgttttttgttttcctttatgaagaaaaaataaaatagtcacattttaatactaaagaaaaaaaaaaaaaaaaaaaaaaaaaaaaagcggccgccgcgtttttttttttttttttttttttttttgctgatctgtctcaggactctgacactgtccaacttgaccctcttggcagcaggatagtccttccgagtggagggaggcgctgcgtagttgtgctgatgtgtggagacgtggcacctcttgaggaccagtgggctgtgaggaggtttgctgtggcctccagcagaaggtgatccagactctgaccttttgccaggagcctgcctcttttccacagaaacaacatcgatttcttcctcatcttcttgttcctcctcagagtcgctgctggtggtgggcggtgtctcctcatggagcaccaggggctcggggctgccctgcggggaggactccgtcgaggagagcagagaatccgaggacggagagaaggcgctggagtcttgcgaggcgcaggacttgggcgagctgctgtcgttgagagggtaggggaagaccaccgaggggtcgatgcactctgaggcggcggcgctcagatcctgcaggtacaagctggaggtggagcagacgctgtggccgcgggcggggttcgggctgccgctgtctttgcgcgcagcctggtaggaggccagcttctctgagacgagcttggcggcggccgagaagccgctccacatacagtcctggatgatgatgtttttgatgaaggtctcgtcgtccgggtcgcagatgaaactctggttcaccatgtctcctcccagcagctcggtcaccatctccagctggtcggccgtggagaagctcccgccaccgccgtcgttgtctccccgaagggagaagggtgtgaccgcaacgtaggagggcgagcagagcccggagcggcggctaggggacaggggcggggtgggcagcagctcgaatttcttccagatatcctcgctgggcgccgggggctgcagctcgctctgctgctgctgctggtagaagttctcctcctcgtcgcagtagaaatacggctgcaccgagtcgtagtcgaggtcatagttcctgttggtgaagctaacgttgaggggcatcgtcgcgggaggctgctggttttccactacccgaaaaaaatccagcgtctaagcagctgcaaggagagcctttcagagaagcgggtcctggcagcggcggggaagtgtccccaaatgggcagaatagcctccccgcgtcgggagagtcgcgtccttgctcgggtgttgtaagttccagtgcaaagtgcccgcccgctgctatgggcaaagtttcgtggatgcggcaagggttgcggaccgctggctgggggatcagcgggagggctgggccagaggcgaagccccctattcgctccggatctcccttcccaggacgcccgcagcgcagctctgctcgcccggctcttccaccctagccggccgcccgctcgctccctctgcctctcgctggaattactacagcgagttagataaagccccgaaaaccggcttttatactcagcgcgatccctccctccgttctttttcccgccaagcctctgagaagccctgcccttctcgaggcaggaggggagccagggacggccggggcccggcggtg

SEQ ID NO: 320 - DNA, 1604 bp, Homo sapiens
ctcctcaccttttaaactgctctttttatctgcttgtgggaatgtcgtctctttcgtggaagattgggtggtctcatgttgaggctgttgcccagtcccattaactcccttgtccccccacagaaggaagagacattgcccagctaagcatcaggaagctgtgttaaaagcccttctatgggtttggttttgtgatgtttttccctaatgggaaaaacgttatagttgtttcttactgccctgtctgggaagcagggcaaacctccaggtttttaaatgagctagatgcccctcttcctcttctctggtcactgaacctggaccaaagcactttgatattccaggtgtgattttctctgtcatggggatttgctccactgcagagccccatcattttcacagcgtaggccaacagagtgagaacctagggctaccctagctgatggatgtgaggctgctgtctacaggagctcatcccagccctgttaactggcagtggcaaggatactcgtcatcggccattgcactggggaactccctcaccccatggcttcccaacttgaaacccagatttacctccagggagaggtgagaaaaaaattgtaaatagacttgctaaagagcaactcagggttggggtgtgttttaattctcctgatcacttgaaataatctgtaggctgagtgcttatgggggtgggggagaagggtgactccagggtcttccattttgtgaagctctgggggtggagtgtgggcatctgaggcctatgatggcactacattgagctgtctgcccttccggaaacccaacgtgcaatcaactgcaaatcaaattcttcacattccagctacagtctttctttccccattgaatctcagtccctggccatgtggtcaaggtggctttctgttaagctaccctaatttcgggaatgggaggggagagaggagggccattacaactctgccttcaagactcatctcttaaaaacaaaacgaaacaaaactacaaccaccatcaaaaccacacgcaaaaaaaaaaaaaaaaaaaaaaaggataactttaaccgaaggaagggtttggttccattcaactccacattcattgtgcctttacttgcattagatttctgtgctttcttcctttccctctttgaagcaattaaaatcttccttgataactgctgtttctttctactcttgtttctggcaatttagtgggttccttctctagtggtcttaaatctcattccactggtggcaagatggggcctagccttcttttcacatgtctaatcttttcctttctcatggtgccctccatggaagtcacagtcaacactgaataaatgactagaatgacacgtgtgcgtgcgcacgcgtgtgcgtgtgtgtgttcatctgtctgcatgtggatcaatttcttttagaaaataatttattgtatgatttattttggagttatattctgattacagtgctccctctcccaaatagcattgattttttcccccctctaaaatgtataatctggtctcaggttggattctttggtacatttctctcttctggatgccatgcagcttaattaaaaccttgctt

SEQ ID NO: 321 - DNA, 2425 bp, Homo sapiens
ctcccgacatacaccccttccctttggggaagggagcctcaggacagcttctgtcctctctgataggatgggagagtctgcagaaaaccatctggggtcccttttccagtccccggcttggagtcgaagggcagatgcaccccaggccagccccacgagatgctggcatagctttccccagaaaccaggttggaagtagatggcttcaagcttgctagtctccacactgaatcctctgtccgttatttatggagtcacacgatgtcatggttcactaggcagcacctcacgctggagctggagtgcgaggttcttaggggccgtgcccaccatgttgccaagccaatgcatgctgagctgaaggaatttgtcttagtggcagttttttaaaaaatgcccccaaagtctatgctgatactgaaaaagggctactgtatctttaaaaacaggaagttgaacccaagctgtgaaaagccagtggtgctctgtgcatggtgctgtgcggagcctggtgctgtagtgttgtgctgggactttcttgactcttgggcaggtcacatcctacaggagctcagcagaccagtgtaacaacagttaatgcatctatcctgatccctgaatttccacattggacaatggtgcatgcctcacacctgagcctgcttcctccatgctgtcattgggttcgggggcctacacttaacaattttaaagtgcaagagtcaaacattttcaacaggttgctataattttcctccctaattggtgccatttctccatttgatcattttctttttttcctttctcccctcttcatccactttaatatagctgttctgaaattctggtgcattcattcggttctttgaaatgagaatgtggtgcttaatttttgtgacgttgtcgagagaggttgggcctgatgggagcaacactcatcatcaccaagtcaaactttgttggagtgttggtttttcttgtgatattagcagaaatgatctcatgctagccatgtggatgtgtgtgtggtgaatggggggcttcatcaggacacacagaggggaatgtggccacacggtggatgaccaccaagccctgagatgaacaggtatttactgagcagttgtattcagatatgggtcttcatgaatcatgtttaacaatcagatgaccgctataggcaagttcctgagcttccgggtgccttgagtaagagctgagaaccggcctgctgggtgtttactgtatctgtttggaagcactggcggagggtcgttgtaagatgtcctgagcatttatgtggtctggttttaactgtaaatagtgaaagattttttttaagcacttttgcctagatttaaacagcaacttgaaaaaaaaaagtatgttttaacatgtaattgtgggagaaattgtaaatagtagccgaatatttaatgtgctttgtctatcctccacttttaccatattctgtaaagttgcatttattttacaggacaaaaaaatgaaatattattgcttttgaaataaatacccaagagcttatcaggacttagaattattcagaactcagatttataggaaaacctctgaccttcagtttgacaagctaaaggaagcagagtctttaatgagcatgctaattttctagttttgaggaaaaattgggtcctttaaatgctattttgcttatcgcatcagtacttttatgcaggtctcatttgactccgtgcttaggtagatgcgggggtgccttgaaaacttcatgtttaagttttgcttttgaataaaatgtgaatttcctatgcccatctcattgagctttctcagtcattgttgctgtcatttgaaatgactccctcaaaacctagttttattagccagctgcctctgctgtagtacatggccaacttcaacataccctggaccaaaacatttttgaggtgcatacccccaacataagttacacagtcccacatccaggtgcacagagtgcgagtgcactccgcgagtgcggggggaggggcggccccctctggtgctcccagcccttcctcctgcagagctgcaggcaagagcagagcaataggcttctcccctgagcagagaccgcagcacagaaatgcaaggtctaaagttgctttttgcctaagaatcagcgagcgatttggcctacttcctcattggcttctattctgatatcagggatgctttttgtagtggtattgtttgctccctcttcgcgttttgactacccgtcattcaggggtaactcatcactcttcacacggggatttaaattaagaaactaattggctcatgtgaacattccaaattttcttggtttcaataccctttttttttcttttgaggggaaaagaggggagaaaaacaggagtgatgtcatttctttttcatgtattcc

SEQ ID NO: 322 - DNA, 1558 bp, Homo sapiens
tttttttttttttttttttttttgcgtttaacatttttatttttaactccgctttggtagtacaaaagtcataaaagtacaaaccagacagttaaaaatacacttgacactcgaaatggtgaaaattttccttacaaatttttacatcaaggtagtagccaactcattgatgacaccaaaaagttgtccatcattagtgttttctagagaaagtctgttgtggattccctcatccttagaaaggaggaggagaaacacaagacctgtaaacatcagttgctttgggaacacaggaattctcatcagatagttcagtataaaccagtaaaaagcgtatgtgttgaaaatactgaacgcttaattttggcaaatttggaagcctgccagacaaaaaccgctcaagtatttattagaaaatatttaaaacatactcttggtatcaatacagttttaaatatttttgagtattctcttgcctgttgtattgctatttaaaaaaaagtgctctgacttgaataagatggaaaaataattaaagctaaagaatatcttacattttatcccccaccattttgagggcatatttttaaagcaaaaaagtatgcttatttgtttttaattaaaatgattagcctagactgcacatatattatttacactaatacatacccctaaaagtcctatattgctactttctggatctcagtgaaatttatttccatactgactttctccagtccacagtgtatatgaatatgtacacatacagtgtttattagttgtcagtaaaattctcatgaaactaaattccccatttatttaaaggttagaaatgtttagttgatgctggaaataaaatcattgaagtctatgtacagtaaatacttggagtatatttttatggaaatcatcttttgggagacaatgaaagatgtgcatttcctatatgaaataaagaagtgctcaaggcaccccccaacactgacatggaggcgggtcttggagaccttgtaactggcctcccccacagctcaccccagagctaccataaatcatgtaatactatttatgcctctgggtcctttcaggtgttttgtaaaatgtacagttataaaaaaaaaaaagaaaaagaaaagtttgccaggcctaaagggaaaagtaactggagtgttttaaataatgagcattagttacaggatgaaaaacaggaaatacacaaagaaaaacatgccagaggtaggtgcaggcccatcttatatgagaagcagggttctaggccgggcgcagtggctcaagcctgtaatcccagaactttgggaggccgaggcgggtggatcacgaggtcaggagatcgagaccatcttcgctaatgcggtgaaaccccgtctctcctaaaaatacaaaaaaaataagccaagcgtggtggtgggcacctgtagtcccagctactcaggaggctgaggcaggagaatggcgtgaactcagaaggtggagcttgcagtgagctgagatcctgccactgcactccagcctgggcgacagagcgagactccgcctc

SEQ ID NO: 323 - DNA, 975 bp, Homo sapiens
atttttctaaaaggggaaataaactatatatatatatgtatcttacccccaattcttccaacagaatttctataggaagccatggatgatggcataagtttgccacatattacatgattttaaataatcctcaaaatacccaaggaactcttaaagagttttggtatgagtatactactttggtttaattttagcttcatggatgttctgcatggaaggatttttgttttccacattttcccattgctagcagagtgaaatccaagagaccaaacatttgcaagcattgtatttgagcacttttgtaaaaaacaaagaaaaagaaaaaaaagaaaatatatataatactaaaaaaaagtatctagaaggctacctcagaatgagactctctaacctacatcagaaccagagaagaatgtgcactatgtgggtctgttatcattattttcttttagtttgtatctttttggagatttatccaagtgccagattactcagtgctataattttcttttagttaaacaaagggggtcagacagacattgcatcatccagacatgccttgttggacatgtagaatccgatggagcactgcacaccagaatgattggccaatgagcagcttctctccctgaaacaataactgcccatttggcaaagggaaagatgacaataatcagaagaagaaaatgaatgggatgcataccatagacgaacgaggcggagactattgcgggaatcttactgttcaggagctgttcctagaactaactcccttactgtcattgatgtgcattccactctgtgcttttctgtacaaccattcaagttttaatttcccaggtgaaccatctttatctgccattaccacaagctttcaagtttccagttattttcatcatcataaccagtacggtgctattatttacctatgtacgtgtagttatgtataattttgtaattagttacaatggt

SEQ ID NO: 324 - DNA, 1782 bp, Homo sapiens
ggccgctttttttttttttttttattcggttcagtctaatcctttttgtagtcactcataggccagacttagggctaggatgatgattaataagagggatgacataactattagtggcaggttagttgtttgtagggctcatggtaggggtaaaaaggagggcaatttctagatcaaataataagaaggtaatagctactaagaagaattttatggagaaagggacgcgggcgggggatatagggtcgaagccgcactcgtaaggggtggatttttctatgtagccgttgagttgtggtagtcaaaatgtaataattattagtagtaaggctaggagggtgttgattattaaaattgaggcctacgagcaggtccaaaagggacccctgaagctgaaaggcgtcgcagagctgggagtgaccaagcggaagaagaaaaagaaggacaaagacaaagcgaaactcctggaagcaatgggaacgagcaaaaagaacgaggaggagaagcggcgcggcctggacaagcggaccccggcccaggcggccttcgagaaaatgcaggagaagcggcaaatggaaaggatcctaaagaaggcatccaaaacccacaagcagagagtggaggacttcaacagacacctggacacactcacggagcattacgacattcccaaagtcagctggacgaagtagccgcctgcccccagtatggagcagcatcgagggttcgcaaaaggcacactggggttgtgtgtgtctcctttggtatattctggaaacatggctacacacacccttgcatcttctgctacagactgcttttcgaagctgtgtaccctcattctggaacttgattaaagtaagatcgtccttgtactcagtttaggcttcttggcaacatacagaagatacacccttttcgtttggatggaaagtttctaagtttatccagaggtaaagcccattgtgtgtctgtgtcatgtaaaaatgtattcacccgagttgcatgtaacgctctgaggccagccagctgtcttctcctggatgagacagactccagatggtaaggagctagcgccatggtggcctgcagtatgcagagcccggcaggaccaagcgtgggcgcctttccaagcttcctctagctttgggcctatgctgtcccctgcaggccctagggaagccacttgcaactatgcggccttcagacttcctcctcagccacctggccactgagacagcatagcctgggtaacggaacagccacctaaggcaagaatggaacggacacaccttgctccctttctgagcccgtttcccaaaacccccccttccaggtgcttctaatgggtgttgccatagcagacgctgctaatgcatcacagcattctttgaaatggaaccagacacagcctgcctctcaatcctcagctgggggctcctagcagcctcttgtatttactcagagttgacacatcacacagatcctgtttggcattcctaccttacggacgtctcaggggtgacaggaccagggcagagccccggtacaaacagacaaggctgcagtcaaatgggagggtccaggtgtccgtgttggagggctgggatcttgtagggcctgtgcgtcctggctgaggatcaaaccacatatgttattgggagaaacgatttctgttgacgtagatattgaaagaataatgaaggcagaagagaaaaacgaagtgtggaatttggggttgtcctgtgtaaattacacaataaagcaaaagtcagttattgt

SEQ ID NO: 325 - DNA, 830 bp, Homo sapiens
  misc_feature 827: n = a,c,g, or t
ggtatatttcatccatacaatcaggaacaaatttaatagtaggaaaggaaataggtacattatatgtgtttctgtatatttatgtttatgttttcatttacatatgtatactgaatatatatttgttactgcttatagatcacatactatgtttcatcaactttaagatttcattaactataaaaatgtcattttatgaaacattaaagaaaaatattgcaaattaactcatgaccttataaagtacatctggatttcagagatgttaagtgtgaaaaaatatcttagaattcattagatatgcttagcaatatatgatactatgcagtagattccattgttttcttgaatagaggcttcagttttctaaataattttccacttataaagattaaaaattagttctgttaaaaatatgtatcatcttctatttggagatagttcagggaactattagaaaatatttacatatacctgaatttttaaaatctgtagctatatatgtcaaggtgctcactgtgttcatctctacatgaatgagattatgaatattaaatgttttattttgcttgtctttgttacttttctgtaataagcattataattcctgttcttaaaataataagttcatttaaggaaaagggggtgaaaggaaaaatctgcagaatttaggtctgagataataccatttcaaagcactgtgatacaaattacttatatatgttatatactgtgtgtgtgttaactacttttatttgggggcttgttttgcatacatgtgaaggaaatgattatatataaggatttaattaaatctgtttataccnccg

SEQ ID NO: 326 - DNA, 1695 bp, Homo sapiens
gtgtctcttccttggggagatcctagccagattaccagaaatttcgttagtcatctaaatcagagacatcaatttgattatggagaatttgtgaatcttcagctagatgaagaaacccaataccaaactgctgttgaagaatcttttcaagtaaacatctgaaggctgtagacatctctgcatctttgtacctgcaagtgccatctttaagggggaaactacatgaagtcaccgttacagtaacttgatgtgtatattaataaaagtaattcagtcattttagtttttgattgaaaataaaggtagggcttctaaaaacttcatcatcttgataagttaaaaaatgaaagttatgacattagctttaaaggtgtaaaaaagatgtttcactaatgtaacggtgaaagagaatccctgttgtactttatctttttgtaatattatttttgaatttttcattatgttgcttttgaaatttgatgcattcctcccatttactttattattgtacacatttaacacacagtagcaaattttgaacgatgtgattgatataacctaacaaatctgagccagttattattagagttgcagaatagaaacttgaagtgctaaatggaataatccaaaggaaattttttaaatgcaggttctagctgaaaaattcaactataagaaaattgtatttatataacatttactatttttgaagactagtgagatttctgtaataattttaattctttaaaagtgaaagcttgttgtaaagatattttctttttgttattagaaggaaatacaaagagaaaaatttctttctttcatgggcatttgatatttcagtctttgactgatttgtaagcctagaatatactaagctgaataacagctctttggcctcagaattttcagtagccagtatttctgattaactaagttgaaactcttattagaaactttcagttggtgatattgtattctagaagatataaatgagaggtttggcttcatctcagtttagaaatttattcaaagctaaagatgtatatatatacatatacttttgtgtgtattatatacacatatgtgtgtatgcagtttgtcaggttatatatagaaatttctatttaaggattttttaaatggacaagcaatagggggttgaagtgttttatctgatttgtttaaaaatttttgtatatcaccaaattttttaaaaaagtgatagtcacagtgctaagttatctagttggctactattacaccttaaaaattgagtttacacacacacaattacctgtttatatggtgctcatttgttattctcaaatataatgtgtgaccgtgatatagtgagaaagattctaccaaccactgtttcactactttttagttaaaattgggtatgttcttaatattcattagtgagaatcacaaagtattttgtagaaggcccaaatcacagaataaaggactaagagtggatttgctgacattccatactaatatacattgtttatgctttctttaaaataactagaagaacataaaagaaagagaatctcagaagtagtttgctgctaatatatacatatattgtataaaaaggtatattttggttttgttaaaacccttgttgacttttctacactgaacattttttttaacttgatttaataaaaatgttaattttgg

SEQ ID NO: 327 - DNA, 2067 bp, Homo sapiens
ggaaggaccgggaaagccgccaagctgagccaccaaagaaagaggctgccaccacggggccgcaggtgaagagagcagatgagtggaaggacccttggcgccgatccaagtctcccaagaagaaactcggggtgtcggtctccccgagccgggctcgaaggcgtctgaaaacatcagcctcgtcagcctctgcctctaattcctccaggtcgtcttcgcggtcatcgtcctactctggctccggctcctcccggtcgcgatccggtcttcatcctacagctcctactccagccgctcttccagacacagctcgttctcaggaagccggtccaggtcccggtccttctcttcgtccccgtccccgtccccaacaccttccccacatagaccttccatcagaaccaagggagagccggccccgccgcccgggaaagcaggagagaagtcagtgaagaagccggccccgcctccagccccaccacaggccaccaaaaccactgctcctgtccccgagcccaccaagccaggagaccctcgggaagccaggaggaaggagcggccagccaggaccccccccaggaggcggacgctaagcggcagcggcagtggcagtggtagcagctatagtggttccagctcccgatccaggtccctgagcgtgagcagcgtctcctcagtgtccagtgctacgtcgagcagcagctctgcacacagcgtggactcggaggacatgtacgcagacctggctagccccgtgtcctcagccagctctcggtccccggccccagcccagaccaggaaggagaaaggaaaatctaagaaagaagacggtgttaaagaggaaaagcggaaaagggattcgtccacacaaccacccaaatctgcaaaacctccagcaggggggaagtcctcccagcagccctcgacaccccagcaggcaccccccgggcagccccagcagggcacatttgtggcccacaaggagatcaagttgacactgttgaataaggcggctgataaaggaagcaggaagcgctatgaaccatcagacaaggacaggcagagccctcctccagccaagcggcccaacacatccccagaccgaggttctcgggaccggaagtcaggtgggagactgggctccccgaagccagagcggcagagaggccagaactccaaagcccctgcagccccggctgacaggaagcgccagctgtcaccccagtccaagagctccagcaaggtcacgagcgtgcccggcaaagcctcggatcccggcgccgccagcaccaaatcagggaaggccagcacgctgtctcggcgggaggagctgctgaaacagcttgaaggccgtggaggatgctattgcacgcaagcgggccaagatccccgggaaagcataggccgtgccccgaccggactggacgcatttttatacatagggtaagcgcagccattttggattttgcagttaatgtcttattttggctgtgattctttttaaaaagtaaaaaagaaaaaaaagtttctcagctggaaaagaagccacacaggaaatgacaacgacgctgaatcccagcctccctccccagagcagaagtcccgcaggacagacagacacagacagcgctagtgaccagcacggttctcatgtaaattacaagccccagccgccagccccgccttctcttcctcctcctccgtcttcttccctggccctggtcaggcctgtggagccccagctctgggtccctagcccgggtccaggcagccaggctccctcctgagctgagaaacggaacctcgcgaaccactggtggcacatccttctcctcccccgcccctgatcacccgcccccggatcagaaatatatctatattctcgactaaagtctcatcaggaaatatttcctgtcttttattttaagcatcaaattgttttagttgatttaaaaaggaaaaaatacagaaaagaccaaaaaaaggccaagggtgttgttggggcgtctgtctaatgtggtgggtctttttttgaggggtctcctaaaataaaatattttgataagc

SEQ ID NO: 328 - DNA, 1998 bp, Homo sapiens
tgccgccgggctgagagaagagcttgcggggtttgcggttgatggccccgactgaagggctggaggcggtgtatgccgctgttcttgctgtcgctcccgacacctccgtccgcttctggtcatgagaggagacagaggcctgaagcaaagacatctgggtcagagaaaaagtatttaagggccatgcaagccaatcgtagccaactgcacagtcctccaggaactggaagcagtgaggatgcctcaacccctcagtgtgtccacacaagattgacaggagagggttcttgccctcattctggagatgttcatatccagataaactccatacctaaagaatgtgcagaaaatgcaagctccagaaatataaggtcaggtgtccatagctgtgcccatggatgtgtacacagtcgcttacggggtcactcccacagtgaagcaaggctgactgatgatactgccgcagaatctggagatcatggtagtagctccttctcagaattccgctatctcttcaagtggctgcaaaaaagtcttccatatattttgattctgagcgtcaaacttgttatgcagcatataacaggaatttctcttggaattgggctgctaacaacttttatgtatgcaaacaaaagcattgtaaatcaggtttttctaagagaaaggtcctcaaagattcagtgtgcttggttactggtattcttagcaggatcttctgttcttttatattacacctttcattctcagtcactttattacagcttaatttttttaaatcctactttggaccatttgagcttctgggaagtattttggattgttggaattacagacttcattctgaaattctttttcatgggcttaaaatgccttattttattggtgccttctttcatcatgccttttaaatctaagggttactggtatatgcttttagaagaattgtgtcaatactaccgaacttttgttcccataccagtttggtttcgctaccttataagctatggggagtttggtaacgtaactagatggagtcttgggatactgctggctttactctacctcatattaaaacttttggaattttttgggcatctgagaactttcagacaggttttacgaatattttttacacaaccaagttatggagtggctgccagcaagagacagtgttcagatgtggatgatatttgttcaatatgtcaagctgaatttcagaagccaattcttctcatttgtcagcatatattttgtgaagagtgcatgaccttatggtttaacagagagaaaacatgtccactctgcagaactgtgatttcagaccatataaacaaatggaaggatggagccacttcatcacaccttcaaatatattaagttgtataaactatcaaggccacaaaatactaatgtcatttggtcataatgactactgataaggcatcagaatggattttcagggctaccagaaaaatgtttccagatggttttagaatgtaggacttatgatccaattcaccaaaagattaaatgaaaccaccctgtgttttaaaatatatataatgttcaacctaatgtatatgcaacatttattctattctaattatttgacaggtaactgcagtgttaaattgtaaatgtgttttctttatgttaccaaaacagcaatttgaaattagaactagtggttttagagaactcaggtaacctttctttcctgacattgttttcagaataaagaatatttttcataatattttaagatacatactatctaaaagtagaattttgttcagcattgacttttataattcccatcctaaaaattcttaatattttcataaaatttgtatttttaaatgaaaattctaaatgttgtattttatcagtaacattttctaagtgaagattaatttactgaggatgatacattatagtattgtattattctctgtagtaagattagtaataagtgaaaataaatgatttaaattc

SEQ ID NO: 329 - DNA, 1355 bp, Homo sapiens
ctttgtcaccttctactggctccttaactaaaatctgccatttggctctctggttaacagtcccttcctgtaaagtctaaaatcttaattctaaatccacagtttaattcacaagctagtacttgactttttttctgtatttgacatttttgacaacccctactttaaagatttattcccttgacttcttacattttgctcactcctgaaccaccccccaccttttggcctcttcatttattccttaaatgttattcctcagacctccattttttttttctctcttaatcacaacaccacttctcacgcttgggtaattttaattcagcagttcctaaatccttatctttagccagactcctcaatccatctgcctgttgcacttttcttggttgtcccagagacacctgtgtgtgtcttaaaacattcattctctgcaaaacctactctaatgcctgtgtcccttactttggttaattttagaaccattatattctaagttttctaggctcattcctctcctccaccttcccctatcatttagtgtctaagttttactgatttttatctccacctctctgatacatcactctttcatcttcattgctattattaataaatacctacagtactaacctgcctcctatacctagctggtctcctctctgttgctcaatgttaccacagcaggctttctagaagcactctgacagtgttactccctaatatccttcagtgacttcaggaactttcaggagaaagccaactcctctgtttggtgtacaaggtcttctgatgtgtttcctccaccgaatgttctggtgaaacagacttacacttcttcagaagccacatttggccaggcctcccgccttggtaaatgctgtactctttgcatcaagtatgctagtcatccttccccacttggaaaattcctatgcatcttgcaggcctgacataagcatttcctctgtgaaacctcctttgctccactcaaggagagtcatctaacttccactttcgtgtcaccactgtaattacaacctacctctattgtatgtcacttaaatcgtactgtattgttttatttttcaaaagtctttactagaatgtgagctccttaagggcaggaaaaggaacctttttattttttgcatctccatagcatagtttttggcatatgaatgtttaataaatgtttgttgaataaattgattttaaagtgacatctttattatattagaggtcctacctatattccaaatactttcactcccttcactttacagcaagggtcagtagagtcccaaggatttgtagactttagggggtcaataaagctgaaattgtattcc

SEQ ID NO: 330 - DNA, 1388 bp, Homo sapiens
actggattaatagatttcagtaaagctcgttcattttgtttggttttctttttacctagttgctatagtgtctacagtctatactcaatacctataaaatgcagtaagcatgtgttacagaaagaggttctggtgggagagaaaggtgcgtgtgagacaggagaattgtcttaagcatataaaacatgtatgattccagaattttagtatgttttgtataaaactatttttcattacggagactagaagtgaacagagaattacacaagtgtgactatacaaattgtaaaacagatactataatatttccttttattttagtgttatttagctttattacagatttctatttttgtcaaaacttcatggttcctttcaagatcttttttgccaaaacattttgatactatagcattgtacatttgaaagtagtgttctagactataaaaccaatgaacttctacatgagccctacagacaggcatgtgtagaaggcaatttatcaaacctattgcactgccatgaaaagtgtgtataataatttgctagcccaagcaagctagttttctttgcttgcttcttttctttcttttttccttccttttttttttttttttttcttttttaacatgttgagattctctagttgttttctttggcgtatctaacccttcttttgttttctgagacctggtaacccacgctcttgcattgtggattttaaatgtatactctgtacggttctgtaaaccgaaaaacttttgtaaatatataaatatacatagacataaaaatactgtatgtgacagcacatagagtagttttcccacacaaagttaatttttatgcatgctttaaaagtatatatcgggaccggcagaaatggaagtatccatacatttttaaaaagcaacaagtttgcacagctagagtgtttttgtaaataaatgtatttgtataacacagtcatgtaatatacagaactataagcagagactttgcaaaactaaataaagggctgcatgcttattattttttgtaccttgtcactataactacttcctagtcaaagaacgaaatgtaactgttaccgagttaaatgtttttccgctttgagggatgtaaccacatccactcagaggacactacttttctgaaagctctggggtgactaatgatgagttcctaataaattaattgcaagtgtggtgccttggatgtggcctgttggctcgctttcttctctgtggcttatcaaggtgtagatgacagaaagcaaacctggatacagagtttccaccctcagttcctggaggggctcttattattttctctctttttaaaaaacttccagtagaagtaaagtggaaataaaatgtctttatcac

SEQ ID NO: 331 - DNA, 2633 bp, Homo sapiens
attcatcaaatcagacccagttgtgcatttccagtttgccatgacacagaagagcgctgtagacttgtgcttagctatgttctagagggtttaaaatctgtcgatagcagcatcaaaaaagaaagcgaccttccagcagctgaccccagcactccaatcccgttaaaatatgaagatgaatcctcaagagggggtcccgaggggctagagaagcagatggccttgtttttggacaaaatgggctcccttcagaagggcaattattccagtcaatctggaatgatccctggctcttggcaacataaaatgaaacttcagctgattctcaagtcatcaaaggcctattatgttttgtccgatgctgccatgagtcttcagaaatacggaagagcattacgatacattaaattagctttgcaaagccatgatacttattgctgcctctgcaccaatatgctttctgaagtgctgttgtttctctctcaatatttgacactttgtggtgatatccaactaatgctggcccagaatgcaaataatagagcagcacaccttgaagagtttcattaccaaacaaaagaagaccaggagatcctgcatagccttcacagagagtccagttgccaaggatttgcatgggcaactgatttgtctacagacttagaaagtcaactctctgttagttgtaaatgttatgaggctgctaatgaaatcttgcagtttagtgacttgaaaagccaaaatccagaacactatgtacaagtattaaagagaatgggtaacattagaaatgaaattggtgtgttttacatgaatcaggctgctgcattacagagtgagagactagtgagcaaatctgtgtctgctgccgagcaacagttgtggaaaaaaagcttttcttgttttgaaaagggaattcacaactttgaatcaattgaggatgccaccaatgccgcccttttattatgtaacacgggaaggctcatgcggatttgtgcgcaggcccactgtggtgcaggggatgaactgaaacctgaattttcaccagaagaaggcttgtattataataaggctattgattactatttgaaagcgctaaggtcattgggaacacgagacatacacccagctgtttgggattcagtgaactgggaattgtccactacttactttactatggcaactctacagcaagattatgctccgttatctagaaaagctcaggagcagattgagaaagaagtcagtgaggccatgatgaagtccctaaaatactgcgatgtggattcagtgtctgctcgacagcccctttgtcagtatcgagctgcaaccatccatcacaggctggcctccatgtaccacagctgtctgaggaatcaggttggtgatgaacaccttaggaaacaacaccgggtgctggcagatcttcattacagcaaggccgcaaagctgtttcagctgctgaaagatgctccctgcgaactgcttagagtacagctagagagagtagcatttgctgaatttcagatgaccagtcagaatagcaatgttggaaagttgaaaacactatctggggctcttgatataatggtgagaactgagcacgcattccagcttatcccgaaggacttattgaagaatttggccagcctaagagttgtgacgccgctgcagctgctgatgcttctcctagtctcaatcgaagaagaagtgatgaaactctccgtatatttgagtctcggtgtcatttctctccttcagtccattaaactgctatcttcaactaaaaagaaaacaagcaattacttcgaagatgacacaattctcaaaaccaacaagcacatttactcccagcttttgagagcaactgcaaataaaaccgcgactcttctggaaagaatcaacgtttcgtccacctgctgggccagcttgccgccggcagtgcagcgagcagcaatgccgttcagtgactgcacagagccgtgtcccagacacgctgtcagtgccttcaacacggagccggtttgttcattcggtgctttgtttcattaaataatagggaaatatccatttaaaacaggtatatcagtggaaacacagagttattttaagtgacagacaaattacggttgagttctgtggcttcttcacttgaagtgctaacatcagaatcaaacttaaagcttccactatttatgtctttgagaagtatgtagtacctcggtattaacagacctgctgtgatgcagttacactttcacgtatttttgaagtatgtcaagctacacgggtctaagatatgattattttggataaaatgttactttggtcaagagaacttttatccagatgacattacaggttcaagtgggttaaggagacctcctgtacatctacagtgtttccttttaaattgtccagaaaaaaggtgtgttcttcataagcttcagtgcaggatttttcaaagacgagctgttgtgcaatttgctgtatttaatgcatgttctgaaaggattcacttttgactttatatgacagttgatcaagaacaggtactacccctttttttcatttcaaacttgaaactgtgaataaggtaagaaaactattttgaataaataaactatttattt

SEQ ID NO: 332 - DNA, 2029 bp, Homo sapiens
catgggtcaaggctgaaaaactgtgatctttatttttccagaaaaccatgttctgcttgtttgaaaatgattgtaaatgctggagttaaccgaatttcatactggcctgctgatccagaaataagtttgcttacggaggcttctagttctgaagatgcaaagttagatgccaaagcagtggaaagattgaagtcaaacagtcgggcccatgtgtgtgtcttacttcaacctttggtgtgttatatggtgcagtttgtagaggagacctcttacaaatgtgactttattcaaaaaattacaaaaacattgccggatgctaacactgacttttattatgaatgtaaacaagaaagaataaaagaatatgaaatgttatttttggtttcaaatgaagaaatgcataagcaaatactgaggactataggtttggagaacctgtgtgaaaatccatactttagcaatctaaggcaaaacatgaaagaccttatcctacttttggccacagtagcttccagtgtgccgaactttaaacacttcggattttaccgtagcaatccagaacagattaatgaaattcacaatcaaagtttgccacaggaaattgcaaggcactgcatggttcaggccaggttattggcatctcgaactgaggatcataaaacaggagttggggcagtcatttgggcagaagggaaatctagaagttgtgatggaacaggtgccatgtactttgtaggatgtggttacaatgcttttcctgttggatctgagtatgctgacttcccacacatggatgacaagcagaaagacagagaaataaggaaattcagatacatcatacatgcggaacagaatgccttgacatttaggtgtcaagaaataaaaccagaagaaagaagcatgatttctgtgacaaagtgcccatgtgatgagtgtgtacctttaattaaaggtgcaggcataaaacaaatctatgcaggagatgtagatgttggaaaaaagaaggcagacatctcttacatgaggttcggggagcttgaaggtgttagcaaatttacgtggcagctgaatccatcaggagcttatggtcttgaacaaaatgagcctgaaaggagagaaagtaagtatttatgtattgaggtgaactttgttgctgaggagaaaggatatacagtgaattttaatgatcaggtgatgaaaattgtgttaatagatggagcatattatttttgaaggttagatttttgccattcaatttgttcataaatatttgtgggtctaccatatgctaggtgctatggaaagtgccgattaataattactcctatagaatctacaggttaatacaaataattatgcacaaattgactttataaattaaatgcatatgaagcagtaaacagcaatgctcttctataacaaaacaaaagcttattggggagtgagaaaggaaaaatatgtataattagtacagatggattgggaccaaatgatgaggatatatacattcttctagagtaaacccacatttgcccagattggaaatgttctggtaacttgaataatctgattaactaagaatcatcacagctaccataatgaattactagtctttaaagctttattattcgtatactactacagatattttgaatgtaatataatctttgagaagtcttacaattctttaggcacataattttagatatgagtgctatataatattattctaaaatagtaactataggccaggtgtggtcactcacgcctataatcccagcactttgggaggccaaggcagggggatcacttgaaatcaggagttcgagatcagcttggccaacatggtgaaaccttgtctccactaaaaatacaaaaaatagccaggtatcatggcacatgcctgtaatcccagctacttgggagtttgaggcaggagaatcacttgaatccaggaggtggagtttgcagtgagccgagatagcgccactgcactccagcgtgggcgacagggcaaaactctgtctct

SEQ ID NO: 333 - DNA, 1754 bp, Homo sapiens
tgaacttctgacctcaggtgatccacccgccttggcctcccaaagtactgagatgacaagcgtgagccactgcgcccagcccttttcattcttaaagatgatagtaaattcctgtaagatttagattcacttttgtgataatgccatgtttccgttatgaacaactaggtagttggagaaactattaaaatagaaaacagtggcaaaggagatggtttggatggaaagagaatgatttcctttttagacatgcatagtttgaggtatctatatttccaaagtggagatgtttaggtacacaatgacatatgtaaatgtagaaactttatttgtgtgtggcaacaggtctagagtgtataccaactctagggagttggaggtgctagagaagggagggcttcaatttcttgctttatgtttcagattatttgaagttttttcaacaaatatatttcacttttagattatagaaaatgtttatgttacagaaaatatttaatactttttttttttaagacatggggacttgctacattgcccagtctggcttcaaatcctgggctcaagtgatcttcccacctcagccttccaagtagctggcaggcatgcaccaatgatatttaatactttgacatcaaagagacttaggttcataaagaagatatattgaggacctcaactaatgtagacagtggtaaaatggacatcaaacgatggtctgtcaagttaaaatattgcaaagttaaaaaatgagcctgctgggattacaggcgtgagccaccatgcgtggccagctttattcttataataagtaccacctaggaaaaccattattccctattttaacaatatgataataatgcaaatgtttagtatagatagtatttgcttttaaagggagataactttgtttcttgttttgtcaatttggcatcttactgtttcttttttttaatgaaaaatgtttaaaaattatgtggtcttgctatgttgcccaggctgctcttgagctcctgggcacaagcagtcctcctgcctcagcctcccacagtgctgggattatcggcataagccactgcaccaagccccatgttactgtttaaaacattaacctgagaggcacagaatctcataaaatgtctattgatttggtcttggcttattgtgtaaaccatttaatagccaaaagtcagaatttaaacatctaaaatacactgaaaatgtgttcttttccaataacatggatgttcacaacagttggtgttacgttagagctaataattatactttagcacgttaacctcagaattctaaggctgagagtcaaacactgctaattcatagaaggcaatagcttgtaataatgaatcataaagctcttctactctttgtagttcagtagataaaaacatctgtctgtagtgaactattttatctgatgggaagaacacccgaggatccgccttcagtatagaatcgaagagaaactgcttcactagctcttttccactagtccgggagtcaccaatcatcagttcaaaatgcttccccactgcatttcgattcatgctcagcacctgatgctgcccatcctgggcaaaagttttatttaataaggcatacagcatggcttccatgatatgaaaatgtaacagtattggaaacagagatgagttctgaatggaaagtcctgttttttccagaacatagaaatctgctttaggcatctttgaaatgatcgaggaaatcttttt

SEQ ID NO: 334 - DNA, 1613 bp, Homo sapiens
ctccgggagggcgtgctggatttcaacgccgaccgcctccgcggggtggactgggcgcctctgctgagcaccctcaagatcaataaagacctgcccttggtctccatccaagagcttcttccagccctggctgggggacacaggttctgacatgaataaattttgcagaagtcgtgttcctgcgataagatacaaagatgtgaccttccagttgtgtaaagctcttaaaggctgtttaagtatatcacgtgtgctaaagaacctggagctaaatggactaattctgagagagagggatttaactattctagcaaagggattgaataaatcggcttctttggtgcacctgtctcttgcaaattgtccaattggagatggaggtttagaaattatttgtcaaggtataaagagctctatcactcttaagacagtcaacttcacaggatgtaatctgacatggcagggagcagatcacatggccaagatcttaaagtatcagaccatgagaaggcatgaagaaacctgggctgagagtcttcgctataggagacctgatcttgactgtatggctggcttaagacgtatcacactgaattgcaacacacttattggtgacctaggtgcatgtgcttttgcagactctctcagtgaggatttatggctgagagctcttgacctgcaacagtgcggcctcaccaatgaaggagcaaaggctttgctagaggcccttgaaaccaatacaactctggtcgttctggatataagaaaaatccactcattgatcattctatgatgaaagcagttatcaaaaaagtcctccagaatggaaggagtgccaaatcagagtaccagtggataacttctccatcagtgaaggaaccatccaaaactgctaaacagaaaaggagaactataattctaggaagtggtcacaaaggaaaagctactattagaattgtaggattggctaacaaaagaaacctgtaagtagtggcagaaaacactcccttggtaaaagaatattatgcgcccgcacctcttccacctggtgtgtctggtttcttgccgtggcgtactgcagaacgtgcaaaaagacacagggtttcccattaatcaaaacacgtgatatatgtaatcagttgcagcaaccaggttttcctgtgactgtgacagtagagagtccttcatcctctgaagttgaagaggttgatgattcttcagagagtgttcatgaagtgcctgagaaaactagtatagaacaagaagcattacaggaaaaactggaggagtgcctaaagcagttaaaggaagaaagagtgataaggcttaaggttgataaacgagtcagtgagctggaacatgaaaatgcccagttaagaaatataaatttctctttgtctgaagcccttcatgcacagtcattgacaaatatgatcctggatgatgaaggtgttttgggcagcattgagaattcttttcagaagtttcatgctttcttggatctccttaaagatgctgggcttgggcagcttgccacaatggctgggatagatcagtcagattttcaattactaggtcatccccagatgacttctactgttagtaatccacct

SEQ ID NO: 335 - DNA, 1733 bp, Homo sapiens
ggagcttccgggagggcggctcgcaggcaccatgactcctgtgaggatgcagcactccctggcaggtcagacctatgccgtgcccctcatccagccagacctgcggcgagaggaggccgtccagcagatggcggatgccctgcagtacctgcagaaggtctctggagacatcttcagcaggatctcccagcgggtagagcagagccggagccaggtgcaggccattggagagaaggtctccttggcccaggccaagattgagaagatcaagggcagcaagaaggccatcaaggtgttctccagtgccaagtaccctgctccagagcgcctgcaggaatatggctcctcttcacgggcgcccaggaccctggcctgcagagacgctcccgccacaggatccagagcaagcaccgccccctggacgagcgggccctgcaggagaagctgaagtactttcctgtgtgtgtgagcaccaagccggagcccgaggacgtgcagaagagggacttgggggtcttcccagcaacatcagctctgtcagctccttgctgctcttcaacaccaccgagaacctgtacaagaagtatgtcttcctggaccccctggctggtgctgtaacaaagacccatgtgatgctgggggcagagacagaggagaagctgtttgatgcccccttgtccatcagcaagagagagcagctggaacagcaggtcccagagaactacttctatgtgccagacctgggcaggtgcctgagattgatgttccgtcctacctgcctgacctgcccggcattgccaacgacctcatgtacagtgccgacctgggccccggcattgccccctctgccctggcaccattccggaactgcccaccttccacactgaggtagccgagcctctcaaggcagacctacaagatggggtactaacagcaccaccaccacccccacggcccccaccacctcccccagctcctgaggtgctggccagtgaatccccactcccaccctcaaccgcggcccctgtaggccaaggcgccaggcaggacgacggcagcagcagcgcgtctccttcagtccagggagctcccagggaagtggtcgacccctccggtggccgggccactctgctagagtccatccgccaagctgggggcatcggcaaggccaagctgcgcagcgtgaaggagcgaaagctggagaagaagaagcagaaggagcaggagcaagtgagagccacgagccaaggtggggacttgatgtcggatctcttcaacaagctggtcatgaggcgcaagggcatctctgggaaaggacctggggctggtgaggggcccggaggagcctttgcccgcgtgtcagactccatccctcctctgccgccaccgcagcagccacaggcagaggaggacgaggacgactgggaatcgtagggggctccatgacaccttcccccccagacccagacttgggccattgctctgacatggacacagccaggacaagctgctcagacctgcttccctgggtgggggtgatggaaccagcactgtgcggagaccagcttcaaggagcggaaggctggcctgaggccacacagctggggtggggacttctgtctgcctgtgctccatggggggacggctccacccagcctgcgccactgtgttcttctctaaagaggcttccagagaaaatggcacaccaatcaataaagaactgagcagaaacc

SEQ ID NO: 336 - DNA, 1684 bp, Homo sapiens
gtgaaactccatctcaaaaatatatatatatatcaattaccaactaaaaacataactccagtttggcagtttgcatattataaggagataaatgttaaaacatacttgactactttcagaaatgttctcctggtactttttgcatttctacattcagataaaaagatttgcatgcacctggctaacgccaagggaacttcatttttttcttcactattatgcactttcatggtatagtctttctcagttcttttaatttttgttatttaacatctttaatagcacagcaaacatcttttcagaaattttcagttaaagcctttgaattacttatctttgatttaatttacagccagcattttgccacgttctaaataatatttagctcaactgattcatacgtattaatgaccattctagcaaaggcctacaagtggtgtgggaatcagggaaaggctgcctctttggtatctcaactggtattgattattgctatcaactatttggggagaaaaaatcaaaatgaagccctgtcaaattttagaagtactatctttggtccttcaaacactttgtgatgacaccttaagaaaaataaagttgaagttcaggtcttgccattgccattacagacaaattaggagacttggtttacctgggaacaaatttacttgaatattcagtacctgaaactatgccaaaccaaagagcagctgcagtacattcgttattttaaatgaacaagtttacaaagtttattttcatctatacgtaaggatgatttttttaaaactttttacatattagtggttatgatccaatgtgtcatgagtgaatttaactgtaaggtggtttaaatcaaatatgcaatgtttacttgaattgtatttctattagcagattttgactatgtttacaggacggttaattaaggattatcaggcatgtgagatctttcagttatctttaaagtagatgtatattaagggcttagatttaggatctacatattctgggcattgaataggcagtaacttacaaataagttttgcttaccttttgttctagggactagcactgctatcaatggaaagtatttttaactaatctgttattaagaaagtcatatttttgcatttcagccaaaataaagaccgcctgtaataatctgtgagaaacagataatacatgtctgaaatccatatgtttcatatgatctaaactgtattttccaatttaaattaaaaatgtaatatagattcagaaaggttcatatttttctaatgacttcattctatattattttgttaggttgcataaagaagcaaggaattgtacttgtattaaaagatgaagaaagctattaggtatatttgtacatgactgcaaatgagtctatgcccgtttaaaagaaaagatggacactattttaaagtgagctttaatatgcttttatataaacaaatttgaagtacagtttagtttggttgtgtttacctaacaagtaccataagccttgtgtttgttcttatttgtataatcctagcctgtgacttaatgttgatgctttgctttgtcttttggctggcctaacctacattgacatgtacacagaacattttaaaactttttttttcaaaagtcataatgaattactttattaataaacaaagtcttgtatttg

SEQ ID NO: 337 - DNA, 1288 bp, Homo sapiens
tttttttttttttttttttttcgagatggagtctcactgtcacctaggctggaatgcagtggtgtgatctccgctcgctgcaacctgcacctcctgggctcaagggatcctcctgcctcggcctcctgagtagtggggaccacaggtgtacaccaccacacctggctaatttttgtacttttagtagagatggtgccattgtactccagcctgggcaatagagtgagactctgtctcaaaaagaaaaaaaaaaactgttagagattagcacatgaactcaatctacacatctggctttatatacagggcagaggttggtggccttcaatgtagtagaaacacagtaggaagattttagtcattcagactggtctctctctttctggatttatctcctaccttgatcaaatttgtctgatttagtggtcatttgttcattcaatgcaggaatcatgtggatcaagacagagaacttgtaggacagttaaatctccagctggccaatagcctaggctctaatgtggcacactgtattcagaatgaagcatcacttgcacctctaaaatttatctacttaacccagggagacctaactgagctcctcctgatgtcccttggaaagtattagtaacactaagaattcttggccaggtgcagtggctcacgcctatattcccagaactttgggagaccaaggcaagagggatcgcttgaggccaggagttcaagaccagcctgtgcaacatggcaagacctttctctctattaaacaaaaacaaagaattctctgccaacaatttatgtggctgagtttgctccctttcccaaacagtctaagtagagtctatgtgtgtcctaccataagagaggggcatgagaaacattccacaggaggttatttccagtgccacctgctgggcagcagtctgattcaggtagttctggggacagtaagacaccctgcacaatcatataaaacacgtttttacagaacatattcctggctgggcacagtggttcatgcttgtaatcccagcaccatgggaggccaaggcgggaggagtgcttgagctcaggagcttgggactagctgggcaacgtggcaaaaccctatttctaataaaagatacaaaaattagccaggtgtggtggtgtgtgcctgtaattccagctattcaggaggttgaggtgggagaatcacttgagcctgggaggcagaggttgcagttgcagtgagctgagaacgtgccactgcactccagcttgggcaacagagccagactgtctc

SEQ ID NO: 338 - DNA, 679 bp, Homo sapiens
gtttctggactttttcttctgctacttgagtccaggatgcaaccattttgtcctgcatctcttctttcctgtagagcctttgaagcattgtattttgggaaaattcttctgtaaatactataacttttataaatggttaagttatttagaattatctccagtgcttacttctcccttcttctgtataaatctgctacttcaattaagttctcctctaaacttttaggtcattgtttatatagcagaaaattcaatgttagcggatggaaaactgcttcttgaataaccttgataggtcatccctgagtgcacctcaggttctctctttacctgggcaacagagtgagactccgtctcaaaaaataaataaaatagaagcagccttgtaactgtatttaccatgataatatattctgcacggtaagaattccttttacagacattctttatcaagaggtcggcccttctttttcaggcacataagccaaatgcaggcctgtgtgtagctgtgtgttttttctgtggttgccgcatttattccacctccagctggaccccccactgcaaatagagaacagcggtgggggatgggggttaaaaagtagagaacctcctttctgttcaactaatttcacgtgacagtgcatgtatttattcaataaaacctttatgttagctc

SEQ ID NO: 339 - DNA, 1531 bp, Homo sapiens
gtttttaatcaatacatatttattgagtgcctactgtgtgccaggtgcaccacactagatgcaacggatactaacagtaaataagatacggtccctgccctcagagcttacatttcaacagtttaaagtgcatctcaggtatttcagataacagaagtaattctaccactctcaaatttttttttttaatgcaagacacaacacaatcataggccagagttataaaatacaatgttagaaagaaacgtttggtatcattcgtccagatcccattttacagaaaagaaactacaggagtggccatttgcacctatgttctgatttcaagtttggtgttttacccattgccaggcctctcataaaacaatattcagatttgccatgtatatatcaatatccaaacgctggtagtatacctgtgcagttgtctcctgctagacaaggaccatataatttatagcttatttaagtgtccactttctttatcccatcctattctttgtgataaaccagaggcatcaggcttaaccaaagtgctgaactttggggcgacttcatgccctaggattcaagatggccagcgggctacatgccgggtctgcctgccaggaccttacttcccattttttgcagttttcctggactgccgggaggcaagcttgtacaagctttataagcctcaaggctgtaaagtgaacttgctttctgcattttccagccatgtgccattgaccaggagtgaactcaagtataaattgcaaggggctacttgtcaagatgacaaatatctaccctactgtttcaactatgaacatattctgaaatgccatatgccaggcgccataccagatactagggacataaatatgaaaaaggtctttgcccctcaggagtaaatattggttgtaactggaacatttgtagctgaaggaaaatctcccaaaaaagatttcaaagagactaaagtaggaatgggtgctggagaatgagcaagaagggtgagagtcccacgggtgaagggagaaagcagcagagaatgaatataagcccggagaatgaacataaatgtgaggggaagaggccagaggccaacactggaaggacagtgagggccaagaaaggaactactaatgtttctgagacctgcagggaaccatggtattaagctctcattaccagcacctaattttttagaggctggttttccaacttaagtgaaagaaattcaccctgtttttagcaattatgacgcactatatttacttctgtcacattagctgattctgtggtggactgggtaatttgaaaagctcctttgaacatgaattgtttttaaacttacagtctagcaataagcctaatttttaaaacagaatgcttaatttctccctgtacaatcagtaagattttgatttttaacaagtttacatgtccaattacatgtagataaaaggaatgaaaaccagtaaagacaccttttataatctgaaaatagatttttaaaccttcctttagattgaattctagacct

SEQ ID NO: 340 - DNA, 1478 bp, Homo sapiens
tcactcttctggaatgtcactcaagaccaagcggtcagaaggcctgaggacccaaggccccactggagcagtctgtccttatgccgaatcaaggcggaacatgggtgaaagacgagtaaggggcaaatcacagcaatattccacagcgccctccagagttacctggggaggaccgaggccacacgccactgcccccgaggccagagtgtaagtaaaggataaccaggactcgctgggagagatggactctgtcctcagcaacactccacagcagaaaggggtagcaggtaccccttcttatcagcggtaaaaatgcatttacaacctttcatttaaccgaaaaacacagaccgctttaacctctttatttctgtcccccactgcatgaacatctatacaattttaaaaatacttcctcataggatgctttggcccttcatctatttaatcatagctacatacctattttttataagtagcagtacacattcaaaggggtattcctagctcaatgcttgggtgttctagttcaacttttatccctgcagcaagtaagcctagataactctacacgatttggctgagtggctttgtgtgaccgtggccccaggccaaggggatcatggccctggctggctttcccgggggtctcagctcctgttgtcagtgataggcggctcaaaggagcatcagtttcttttgatccaagaagtgcttactgaatgcctgccctgtgcgtggccttaaacattgagaagtgctgctctccgtttatttgggatttgattctcattttaccatagcttatattctcaatttcaatgccagtctcagaactcttgtttctgtgttctgttctcaaaattacattgtccctcatgtcatttcaaactgttttccaaagggatttgagcatatacaactacaaatccaagcagattgactctcaaaaataatcttaaatactgcaaatagtcccaactaagattcagtcagtatgtttgttttgcaagtttgggagagtaagttggctttgagtcacacatcgaagctttaagaggtgagacgctggcttcattctggactagacaggaacttggcctcagcgtgagatcctgccatgcagtgttgcggtggcactgaagaagtgtgaatgtgaaggcggcgtcggcgcggggccagagcaccactctgctgccccaccacgcggcctgtgaggagccactaaacctttccgtgcctagacctccccatctgtggaatggggtcaataccacctacctcacaggggtgttgtgaggactgagaagaacaatgtcaaatgtttttaatactcagatgtgggagcgacatcaatgaaatctgtactgtatgaaagctacacaaaaatgggcagacatttggttaattgtgccagatacctaaaatgtatgttcagaaaagcattttatcaactcagaaatatgacttatttctag

SEQ ID NO: 341 - DNA, 524 bp, Homo sapiens
ctctacaaaccacaaagacattggaacactatacctattattcggcgcatgagctggagtcctaggcacagctctaagcctccttattcgagccgagctgggccagccaggcaaccttctaggtaacgaccacatctacaacgttatcgtcacagcccatgcatttgtaataatcttcttcatagtaatacccatcataatcggaggctttggcaactgactagttcccctaataatcggtgcccccgatatggcgtttccccgcataaacaacataagcttctgactcttacctccctctctcctactcctgctcgcatctgctatagtggaggccggagcaggaaaaggttgaacagtctaccctcccttagcagggaactgctcccaccctggagcctccgtagacctaaccatcttctccttacacctagcaggtgtctcctctatcttaggggccatcaatttcatcacaacaattatcaatataaaaccccctgccataacccaataccaaacgcccc

SEQ ID NO: 342 - DNA, 1823 bp, Homo sapiens
  misc_feature 632: n = a,c,g, or t
ccagagcgggtgtgaggggcgccgatggcggagggaacggcggaggctcctctagagaatggtggtggtggcgactcgggagccggagctttggaacgaggagtggcgcccattaagcgtcaatacctcaccaccaaggagcagtttcaccaattcctggaagccaaagggcaggagaagacttgccgggaaaccgaggtaggagaccctgctggcaatgagctggctgagcctgaggctaagcggatccgactggaggatggacagacggcggacgggcagacggaggaggcagcagagcccggggagcagctacagactcagaagagggcccggggacaaaacaagggccggccccatgtgaagcccacgaactacgacaagaacaggctgtgtccctccctaatccaggagtcggctgctaagtgtttcttcggtgatcgctgccgctttctgcacgacgtggggcgctacctggagaccaagccggccgacctgggcccccgctgcgtgctcttcgagaccttcggccggtgcccctacggcgtgacctgccgcttcgctggggcccacctggggccgagggacagaacctggtgcaggaggagttggcggcccgcgggacccagccncccgtccatccgcaacggcctggacaaagccctgcagcagcagctgcggaagcgcgaggtccgcttcgagcgagctgagcaggccctgcgccggttcagccagggccccacacccgctgccgctgtccccgagggcacggcagccgagggcgctcccaggcaggaaaactgtggtgcccagcaggtccccgcagggccgggcactagcacccctcccagcagccccgtgcggacctgcgggcccctgacggatgaggacgtggtcaggctgcggccctgtgagaagaagcggctggacatccgtggcaaactttacctggcccccctcaccacgtgtgggaacctgcccttccgacggatctgcaagcgcttcggggcggatgtgacatgtggagagatggccgtctgcaccaacctgctgcagggccagatgtccgagtgggccctactcaaacgccaccagtgtgaggacatctttggcgtccagctggagggcgccttccccgacaccatgaccaagtgtgccgagctgctgagccgcaccgtggaggtggactttgtggacatcaacgtcggctgccccatcgacctcgtgtacaagaagggtgggggctgtgccctcatgaatcgctccaccaagttccagcagatcgtccgtggcatgaaccaggtgctggatgtgccgctgactgtgaagatccgcacaggcgtccaggagcgtgtgaacctggcgcaccgcctgctgcccgagctgcgggactggggcgtggcactcgtcacgctccacggccgctctcgggagcagcgctacaccaagctagctgactggcagtacatcgaggagtgcgtgcaggccgccagccccatgcccctgttcggaaatggggacatcttgtcatttgaggatgccaaccgcgccatgcagactggtgtcaccgggatcatgattgcccgtggcgccctgctcaagccgtggctcttcacggagatcaaggagcagcggcactgggacatctcgtcgtccgagcgcctggacatcctgcgggacttcaccaactacggcctggagcactggggctcggacacgcagggcgtggagaagacccggcgctttctgctcgagtggctgtccttcctgtgccggtacgtgcccgtggggctgctggagcggctcccacagaggatcaacga

SEQ ID NO: 343 - DNA, 1381 bp, Xenopus sp.
aagaattcggcacgagggaaaaagagggctcctctgggagatgtatgcttactctcttaggcctttcattcatcttggcaggacttattgttggtggagcctgcatttacaagtacttcatgcccaagagcaccatttaccgtggagagatgtgcttttttgattctgaggatcctgcaaattcccttcgtggaggagagcctaacttcctgcctgtgactgaggaggctgacattcgtgaggatgacaacattgcaatcattgatgtgcctgtccccagtttctctgatagtgaccctgcagcaattattcatgactttgaaaagggaatgactgcttacctggacttgttgctggggaactgctatctgatgcccctcaatacttctattgttatgcctccaaaaaatctggtagagctctttggcaaactggcgagtggcagatatctgcctcaaacttatgtggttcgagaagacctagttgctgtggaggaaattcgtgatgttagtaaccttggcatctttatttaccaactttgcaataacagaaagtccttccgccttcgtcgcagagacctcttgctgggtttcaacaaacgtgccattgataaatgctggaagattagacacttccccaacgaatttattgttgagaccaagatctgtcaagagtaagaggcaacagatagagtgtccttggtaataagaagtcagagatttacaatatgactttaacattaaggtttatgggatactcaagatatttactcatgcatttactctattgcttatgctttaaaaaaagggaaaaaaaaaaaactactaaccactgcaagcttttgtcaaattttagtttaattggcattgcttgttttttgaaactgaaattacatgagtttcattttttctttgcatttatagggtttagatttctgaaagcagcatgaatatatcacctaacatcctgacaataaattccatccgttgttttttttttttttttttttttcttttcctttaagtaagctctttattcatcttatggtggagcaattttaaaatttgaaatattttaaattgtttttgaactttttgtgtaaaatatatcagatctcaacattgttggtttcttttgtttttcattttgtacaactttcttgaatttagaaattacatctttgcagttctgttaggtgctctgtaattaacctgacttatatgtgaacaattttcatgagacagtcatttttaactaatgcagtgattctttctcactactatctgtattgtggaatgcacaaaattgtgtaggtgctgaatgctgtaaggagtttaggttgtatgaattctacaaccctataataaattttactctatac

SEQ ID NO: 344 - DNA, 1554 bp, Xenopus sp.
gaattcccatagcaacaaacagtacccatagcaacaaacagtagagaagtcaacatggcagagttgtggctatcactttcttgcatgttctccttgcttctactgacaaattcatctccacttaccttccaggaaagaatgctccttaaagccttggggctgaacaccagaccaaaccccattgctccagctcctgtacctaaatctttaagagacatttttgagaaggggataaaccaggacaatccctgcatgatggaaggtttcggagtacctggaaatattgtccgctcatatcgagatcaaggaaccatagcagccatagaggagccacaaggatctctgtgcttaaagaaatttctcttttttgacctatcagcagtggagaacaaggagcaattgaccctaggccaactggaaattaagttcaagcacaacacatattatggacaacagttccatctccgcctctaccgcacccttcagctatctctaaaagggatgagagacagcaagatgaacaggaagctcctggtgactcagtctttccgtctccttcacaagtccctctatttcaacttgaccaaggtggcagaggactggaaaaaccctgagaagaatatgggtctgatactggaaatatatgcaagcagtgaacttgcaggaggcaatcgatcatttgtagtatgtgaaccaatacagtctttcatttacacttctctgctcactgtgtccctagacccatccaattgcaaaactcaacgagccaagaggagtactcattcatcacctccaaccccaagcaatatctgcaagaaaaggagattgtacattgacttcaaggatgttggatggcagaactgggtcattgcaccccgtggttacatggcaaactactgccatggagagtgcccctatccactgacggaaatgctaaggggcacaaatcatgctgttttacagactctggtgcattctgtagaaccagaaaacaccccattgccttgctgtgcccccactaagctgtctcctatctccatgctatattatgacaacaatgacaatgtggtactgaggcactatgaagatatggtagtggatgagtgtggttgcaagtgagtttgctttggagattgttctcattcccttatctaagccttaaacttatcctctaaagggactgctgccaacctagttatgaagcctcgcgcctcgtgcgacagtgactttaaccatcttacataacattaattgataagactatatttattttggggtgtacttgccctttaggtggtttggcaaatgccatgcgtggctcttaacagagctgctggatgaaacacatttttaaaaaagtatattgttgtcaataaatgtttttatctttatatattgggcatagagctaggttggtgcctgaaaattgcctagcacttgcaagtacagctgattgttggaaataaatgtgatttaacccaaaaaaaaaaaaaaaaaaaaaaaaaaaaaaaaaaaaaaaaaaaaaaaaaaaaaaaaaaaaaaaaaaaactcgag

SEQ ID NO: 345 - DNA, 1998 bp, Xenopus sp.
gaattcccatagcaacaaacagtaggaaggagaaacatttgtcttttgtgcatccataaggaaaatcccaatggcccctcagctgtgtcagagcctgggaaagccactgattgttttgctgtgcttcttggcgtgtggctcgcaatctatgtatctggacttctttggcagctcctcaagatgcatgcgaatcccaaagagtatggctctctgctatgacattggatattcggagatgaggatccccaacttgctggaacatgagacgatggccgaggcaatccaacaatcctcaagctggttacctcttttggcaagagagtgccatcctgatgcaagaatattcctctgctcactctttgcacctatttgctttgatcggtatatcttcccatgtcgcagtctgtgtgaggctgtaaggagcagctgtgcccctatcatggcctgttatgggtacccttggcctgagatcctcaaatgcgataagtttcctgaagaccacggcatgtgtatctcaactatcacaaatgatactggttctacccgtagaacagtgccccgagccagctgtagagactgtgaacttgaagaaggcagcacttccaaggagatactggatacattctgccataatgattttgttgccaaggtccgtatcaccaaaaagaacatcacttccgctaacctttacgactttgatttggattccaaacttgagatcctgaaacacggctcgttacccaaaacagacgtccttcctaggcttcagcagtggctggatctggatgctacctgtgtgcagaatatcatgcgtgggacccgcacaggcgtctatgtgatttgtgcagaagtgcaagaggggaaggtagtggtgaacaatgcctacgcatggcagaaaaagaacaaaaacctgcatttcgctgtacggaaatggaagaatcacaagtgtcgaccataggaattcccaattcgttgtacagaaaccaaagtcctgtgttgtgaaatagtagaagcaggggcattcacgagaactgtatataatactgtatatatctatgttaacttactataaaaccttattgataaaaagagcggagcggtctcctactgtttgagaggacaccgtgtcatcagaaaagggcaacagtatattatgaatagatcttttaagaagagtggaggtgaaattgtgggttctctggcccctgaggacaatggctgtagcataggtgatttcaatttgacatgggccacgtcacccagtgcacccagtacaaccggtaggaattcagtgatatttataacacagaatcagacatggagactctttctaaaagacacatgggcttatttactaacatagcggctcaactgaaatgacccgattggctgcatttgagcaattatgttagtaaattaaacctgcagtagttctattgtttacaccatagcgaggaaagacattttcgaagaacagaaaaagctgcatttttttcaaaatatactgtatatttttcttaaggggaaactgttgccaaaatgaagatttaatggaagcttcatcatacggaaatgagaaactttctaaatgcaattaattagaagagaaacggatgctgagagagggatagtgaacataaacttgattatttcagaaatggtacagaatatttaattgattgtatttggaaagtttctcgtttcggtatgaggaggcttgtatggaattttcattttggtgatagttcccctttagatgaaaagtcacacagtactgtttaagtctgtgtaaaaaaaagtgggatatataagagacgtacctacatgtagtgactgcaaaaatctctagtgcacttataaatataaaaaaaatgtcattatatatactgggacagggatgacgccacactagagcttgaacatacactggcacccaataaaagatgaaataataaagcagtgaaaaaaaaaaaaaaaaaaaaaaaaaaaaaactcgag

SEQ ID NO: 346 - DNA, 1145 bp, Xenopus sp.
gaattcccatagcaacaaacagtacatcatttgggaaggagaaacatttgtcttttgtgcatccataaggaaaatcccaatggcccctcagctgtgtcagagcctgggaaagccactgattgttttgctgtgcttcttggcgtgtggctcgcaatctatgtatctggacttctttggcagctcctcaagatgcatgcgaatcccaaagagtatggctctctgctatgacattggatattcggagatgaggatccccaacttgctggaacatgagacgatggccgaggcaatccaacaatcctcaagctggttacctcttttggcaagagagtgccatcctgatgcaagaatattcctctgctcactctttgcacctatttgctttgatcggtatatcttcccatgtcgcagtctgtgtgaggctgtaaggagcagctgtgcccctatcatggcctgttatgggtacccttggcctgagatcctcaaatgcgataagtttcctgaagaccacggcatgtgtatctcaactatcacaaatgatactggttctacccgtagaacagtgccccgagccagctgtagagactgtgaacttgaagaaggcagcacttccaaggagatactggatacattctgccataatgattttgttgccaaggtccgtatcaccaaaaagaacatcacttccgctaacctttacgactttgatttggattccaaacttgagatcctgaaacacggctcgttacccaaaacagacgtccttcctaggcttcagcagtggctggatctggatgctacctgtgtgcagaatatcatgcgtgggacccgcacaggcgtctatgtgatttgtgcagaagtgcaagaggggaaggtagtggtgaacaatgcctacgcatggcagaaaaagaacaaaaacctgcatttcgctgtacggaaatggaagaatcacaagtgtcgaccataggaattcccaattcgttgtacagaaaccaaagtcctgtgttgtgaaatagtagaagcaggggcattcacgagaactgtatataatactgtatatatctatgttaacttactataaaaccttattgataaaaaaaaaaaaaaaaaaaaaaaaaaaaaaaaaaaaaaaaaaaaaactcgag

SEQ ID NO: 347 - DNA, 1140 bp, Xenopus sp.
ctcgagcatgactggagtcttcctgctcctctgcgcctccatgctggccgccgccgcctttgacattggattatccaccaagtgcgttcccattcccaaagagatggccatgtgcaatgacgtcggctactcggagatgcggttgccaaacctgttgggacacactaacatggcagaagtcgtgcccaagtcagcagagtggcagaacctcctacagaccggctgccacccctatgccaggaccttcctatgctccctattcgccccagtctgcctggacacgttcatccagccctgccgcagcatgtgtgttgctgtaagaaacagttgtgctccagttctggcatgtcatgggcactcctggcctgagagcttagactgtgacaggttcccagctggggaagacatgtgtctggacactctcagcaaagagtatcagtatgcctataaagaactgccaaagccaagctgccagggctgcccacttattgaagaattcttttcacacaagacagtcttggaagctttttgtgacaataactttgctgttaaagtgaaattggcaaagaagaaaacaacttcaggacttcatgaatatgagaccgaaggcccagttgagttcattaaacaaggtctgctccttccatatgacacacgtaccatgattgaacagtggctgctgattaatgagaattgtgctcagaagctgatacggaacagacccacagtgtatgttattgctggtgacatccatcatggaaaggttaaagtcaacagggttttccactggcagaaaaaggactctcagctgacacttgccacaaggaggtggagacaccataaatgttaatacagttcttgtacttcactgtatgtaaatacacaaggcactcttttttaaaaggactataaatatatatatatatatatatatatatatatagtaaaacataaagacttattataacagctggattgagcgcatcccattaccatgctgaagaggaaatactataaaattgcagcaattatatgaacattgtataaactgagcaaatattatatgtataaagtgagaaaatattaaatatttataacggaaaaaaaaaaaaaaaaaaaaaaactcgatcgatgggatcc

SEQ ID NO: 348 - DNA, 807 bp, Homo sapiens
  misc_feature 704,705: n = a,c,g, or t
gtgagccaagatcacgccactatactccagcctgggtgacagagtgagactccgtttaaaaaaaaaagttgctaaatctggccgtcctaaactagatggcagactgagaaatgtgactcccctccccagtaccttgttttctgtgtccttgtagccgtggtccttcagcatatctctgtgctgcagacaacacaccttcctgatggaggtgtccggctgttggagaagtctgggggcttggaaatcatctttgatgtttaccaggccgacgctgtggccacattccgaaagaataaccctggcaaaccctatgcccggatgtgcattagtggatttgatgagcctgtcccagacctctgcagcctcaagcggttgtcttaccagagtggggatgtcctctgatctttgccctggtggatcatggtgacatctccttctacagcttcagggacttcacgttgcccaggatgtgggcactgacctcacagctctgcagaggatggagcttgctccgggggaccgggactgtctgttctcagggaccatctcggctgcctcctgtacccagactctaacctgtagcttcagaggccagtctgggccttggccctgggtgtctgatactcacagagtgaaactgtgaccctctcccttccctggtgccttgcagtgacccctctggaactcaggactcgattttaagnncccaggaggtggggcagaagagaggactgtgtgcctttaacgagagggtgcctgcttcgtgctataaagccaaagccattaaaaaaagatttcttttctgcc

SEQ ID NO: 349 - DNA, 533 bp, Homo sapiens
gtattattattgtcatctttctctacttatgggaaactgagctgctgagaggttaagtataataatatgtcagatccaggactttaagccgccaatgctcagcacagtccgctgtggtgctaacattagaaaagtgctatttgccctcaaccaaatggaaagaaagagagggaaaactatccaaagtctgtctgcaaggtgactgaaaacaccttgtcaaaatgaagcagcgctgtgtagctgcctcatatgctcatccagaaatcccagccagaaggaggactttactacttgcagtcatgttgggcagatctcctgaggtcaggagttcgagaccggcctgaccagcatggagagaccctgtctctactaaaaatacaaaattggctgggtgtggtggcgggcgcctgtaatcccggctgcttggggggctgaggcgggagagtcgcttgggcctgggaggcggaggttgcggtgagctgagattgcaccattccactccagcctgggcaacaaaagtgaaactccatccc

SEQ ID NO: 350 - DNA, 1127 bp, Homo sapiens
caaaaaaattagctgggtgtggcagtgtgcgcctgtagtcccagctacttggggggctgaggctggagtattgcttgagcctgagaggtcaaagctgcagtgagccataactgagctactgcactccagtctgggcaacagagcaagaccctgtctcaaacaaaaccgaaaccaaaaacaaagaatgaacacatgtcgacgtcttatttctctcttccctgccattggtactttttgcctattcagatccagctcaaaactcaactttttcttgtacactttctcttatcaacagaactgaaagagacccctccctgttagtactatgtgtcttagtactctgtctttgatgtgtggcacttccttttgacttgacgcatccagatgacataggaacccatcacagggattaatcaaatgttgactaacgcatggggacccagggtggaaccaaagcttttgcaaaatgatgaacattcagaggctttggagagtgaacttggaggtcaacaaagaggatgaaatgcaagatgcagtatgagcatgtggtgggtctggactgcaagattcaggcactttattttaggaatagttaatgtgaagaacatgatttatgaacgacagagtggggagtgtattgagaccaagtaagactaatgctccattgtgaaaacttacatatcaaagcaaatatattgtcccctctgtccccagaagcaataactggaaacagttttagaggacataacctaattggtataaaaacttttcactctcagaactatttttcccattgtcataggagtggataccaaataatgttttcctgtcttggcagtgattcacattactgagtttgctattgaactattttttccttgccaggaagtacacatcagagagctgcatttcactgtgtgtgtgtgtgtgtgtgtgtgtgtgtgtgtgtgtgtgtatctatttcaatctactgattaccaaagagcttataattcttaatggagagtttgtggaaaagatgaaaaaaggatttttttaaagaacaataaccagaaagtttgagacaattgagtattatagcaaagtcctttcttgcggtgacttctctggttgtaatgtcttgggtt

SEQ ID NO: 351 - DNA, 812 bp, Homo sapiens
cgccaagcatgggtgtactgtgtaggcagccatgtggcctgatagtctctaccagtcctgctgtctctcggctgagaatcaaacccatcctgaatgatgggaaatgtgtcctctgctagctgtgttttcagtggagctcaggggagggaaagggccaagccattactagggtgctgttgggagcagtgaaaaggccacatcctttccaaaggacacttttcctggaaagcccctggagcttagctggctcatcctgtgaagccggttctggccactagggtgcagggccatgaactcagcctggaggaagcctgcagggcagctggcactctggagggacagacagaacaggccaccaggtgcagacaggcaagggaggcaggaggatggaatggaagatgcctgggctggatggaagtcagtgcccttgggtgctggtacctgccttcccggacaccgctagatcaggattctgagcctgttggctgtcagggctggactgtgccccataggcaccacggcagtccccgtggaatcccccaggtgtcaccaggcagcatccaggaaacaggcctggaaggtccccatcagcccagttggacatgctcagacactctggggctccccattcagtggcacaaactccaggagccagtgaaggaaataggaacacaccaggatgagcagtatggctaaaagctatttattccaaaatgaaaagcaaaataaacaggagtctcatcaccaggggagccacaaccccatccctgcctccctcctctgtcatatgctatcaaataagttccccagcc

SEQ ID NO: 352 - DNA, 669 bp, Homo sapiens
gacttaatcaattacaatttatgggctagagccaaataggttgaagacaatcatccaaacagatcaatggaatagaatttcattggaaatgttaaacactttcccaacaatggtcatgactttcttctgtttttgagaagagtttcatatgctggaccacattttagcttttattgttttttttttcccattgtccaaaaagttaagcaacaagtggccacacttttacgtgactacaacctggagttctgcaaagaaggtaatatttacttggtctttgactaaagttatctccccattctatggttacattttattttggactatggggacttctaatacgttttggtaaagaagagagtataaagaaaattcttgtcaaatttcactcaaaagtaatttcatgagaaatcaatgatttaaagcattatccaaattaaattatcatttgcagcaaactgtacaacagcaggaaggatatggaatggaacatgaggtatatatctttgcctttataattttaacatcttatattgaagattctgaaaacctatctttattagaggaaaatctcaatcttcagttttggccttctgtcagcagaatgataagtgcaatagttgtaaatctacttgacactgtaataaactgaactgaactttcaaagtc

SEQ ID NO: 353 - DNA, 888 bp, Homo sapiens
gaaaatatccacaatgaaatttctacaagattagaggaaggagagaggcaacggggattccatttctactaggagtatcaacctctgagagaaaaatatccatctctgtggatgtcatctgctctgcagaaaaccctttcctggaactcccagatcattgacaggcctgagagttttccatacggcctgcaccctaacctctgggaagaaaatatccacaatgaaatttctacaagattagaggaaggagagaggcaacggggattccatttctactaggagtatcaacctctgagagggatatatccatctctgtggatgtcatctgctctgcagaaaaccctttcttggaactaccaggaaacatgaatctgatgtggaccctcctccttttcctccttttggacgtaactgtcttcattccagccctgcccttctcaacacgacatatagacaaccccaggtcgtgggtccctagaggacaccaccgatactgtgatgtgatgatgaggcgccgttggctgatctataggggtaaatgcgagcagatccacacattcattcatagaatctgaccaccatagcagatttctgcagaactccaccactgccctgtaccaacagcccctccatgtgcagctgccacaacagtactcatgatgtcaatgtcactgactgctttgccagcacagggacccgacctcttcactgccactaccaaaaataaggagtccaccaggcccatgcgagtgggctgcaagaagggggcatctgttcacctggatggctaggttcctcctgacaacggcacctgaatgacttgcaccctacgccttcaaatctgtgcagcactgtcaaggtcttctttgtaaatgcttcgtcctttgc

SEQ ID NO: 354 - DNA, 1561 bp, Homo sapiens
gcgagggtggcgcatgggaggccgagcctgaatccttgcctgtgtctgacgggaccactactaaaaacctaaaaatatctgtgaatggagcaagttcaggggtcttatggaggtggccggcccctccccgctcccttccactctgcacgaggccgccacaccggcgctggctccctgcccggcccggccctccctggcaatccctgggctctcttgcacccctaactgccccctgcctgctccggcactgccccaggcccagctcctggccctaggtccctcccagccccatgtgcctgccgcctgccctccacacatccctgtccccccaacccgggaacccctgccctcctccagcaggccgcaccgcccctggggccccctgccagccccttcccaggctgggagacggcagaagagatagaatcagggctgcccccacagagtgggacccaaggggctaattggaggcacgaggggacccctccccagggccttttcctcctctgcgtcttccatctactgaaatgggagagggggtggggagcttctgttctggtgaagggacccgggcaggcccccagcaccccatgctgacttggagaaccccagatctctggggcccagccaggcagggtgtgggggcagctgtgccaatctacctcacaggcccaccccctgccgggcatgccgtgggatcatgggcagggaaggctctgggggtcggagacaccgctgcttagcacccccagccagaacaccctgagggtctcggggctctggagagagtggggcgggaggaagaattggcaccttcctagggaaggagacgagcgcttcgccttgattctccgagaagcctccgagaagtgctttaagtgtgtttgcatgcgccaggcggtgggcagcggggcctgtccagccctctcccgccatccttccccaagtgacgtccactgccttgtcaccagcgacctgcctgtcatgcccaccccctgaggaagcatggggaccctaacaccctggtgccctgcaccagacaggccgtggtcaggcccaggccaccggccgggttctgccacagcttcccacgtgcttgctgacatgcgtgtgcctgtgtgtggtgtctgttgctgtgtcgtgaaactgtgaccatcactcagtccaaacaagtgagtggccctcgaggccacagttatgcaactttcagtgtgtgtcataacgacgtcactgctttttaaactcgataactctttattttagtaaaatgcccaggagtcctggaagctacgcggacttgcagaggttttattttttggccttagaatctgcagaaattaggaggcaccgagcccagcgcagcagcctcggacccggattgcgtttgccttagcggatatgtttatacagatgaatataaaatgttttttttctttgggctttttgcttcttttttcccccccttctcaccttcccttctccccgaccccaccccccaaaaaagctacttcttcattccgtggtacgattattttttttaactaaaggaagataaaattct

SEQ ID NO: 355 - DNA, 1997 bp, Homo sapiens
aaatcaagttgctccactatactgcataagcagtttagaatcttaagcagatgcaaaaagaataaagcaaatgggaggaaaaaaaaggccgataaagtttctggctacaatacaagagacatatcattaccatatgatctaatgtgggtgtcagccggattgtgttcattgagggaaaccttattttttaactgtgctatggagtagaaacaggaggttttcaacctagtcacagaacagcacctaccccctcctcctttccacacctgcaaactcttttacttgggctgaatatttagtgtaattacatctcagctttgagggctcctgttgcaaattcccggattaaaaggttccctggttgtgaaaatacatgagataaatcatgaaggccactatcatcctccttctgcttgcacaagtttcctgggctgggaccgtttcaacagagaggcttatttgactttatgctagaagatgaggcttctgggataggcccagaagttcctgatgaccgcgacttcgagccctccctaggcccagtgtgccccttccgctgtcaatgccatcttcgagtggtccagtgttctgatttgggtctggacaaagtgccaaaggatcttccccctgacacaactctgctagacctgcaaaacaacaaaataaccgaaatccaagatggagactttaagaacctgaagaaccttcacgcattgattcttgtcaacaataaaattagcaaagttagtcctggagcatttacacctttggtgaagttggaacgacttatctgtccaagaatcagctgaaggaattgccagaaaaaatgcccaaaactcttcaggagctgcgtgcccatgagaatgagatcaccaaagtgcgaaaagttactttcaatggactgaaccagatgattgtcatagaactgggcaccaatccgctgaagagctcaggaattgaaaatggggctttccaggggaatgaagaagctctcctacatccgcattgctgataccaatatcaccagcattcctcaaggtcttcctccttcccttacggaattacatcttgatggcaacaaaatcagcagagttgatgcagctagcctgaaaggactgaataatttggctaagttgggattgagtttcaacagcatctctgctgttgacaatggctctctggccaacacgcctcatctgagggagcttcacttggacaacaacaagcttaccagagtacctggtgggctggcagagcataagtacatccaggttgtctaccttcataacaacaatatctctgtagttggatcaagtgacttctgcccacctggacacaacaccaaaaaggcttcttattcgggtgtgagtcttttcagcaacccggtccagtactgggagatacagccatccaccttcagatgtgtctacgtgcgctctgccattcaactcggaaactataagtaattctcaagaaagccctcatttttataacgtggcaaaatcttgttaatgtcgttgctaaaaaataaataaaagctagatactggaaacctaactgcaatgtggatgttttacccacatgacttattatgcataaagccaaatttccagtttaagtaattgcctacaataaaaagaaattttgcctgccattttcagaatcatcttttgaagctttctgttgatgttaactgagctactagagatattcttatttcactaaatgtaaaatttggagtaaatatatatgtcaatatttagtaaagcttttcttttttaatttccaggaaaaaataaaaagagtatgagtcttctgtaattcattgagcagttagctcatttgagataaagtcaaatgccaaacactagctctgtattaatccccatcattactggtaaagcctcatttgaatgtgtgaattcaaaacaggctatgtaaaatttttactaatgtcattattttgaaaaaataaatttaaaaatacattcaaaatt

SEQ ID NO: 356 - DNA, 909 bp, Homo sapiens
aaaatatatattaaaatgttctctaaatattttctgcttcttgcaggtctctttttactagatcatggctgttcttcccacctcatccctctgaaaataaaaatgtattgccctccccaccatccatcatagccaggccactaacttgacttggtgcaagagattcttgctgcgaactttgtagagccagtgtgcagatagaatttggctttgagggttcctgatggctttttagtctttaactgtgtgtgtaccagtctcacatttggcccaaacctcaggattctccctctgcctgtcttacttcatggtactagaagaccttcctcgccactctctccacatgagagagtcagctgccctttctcctgtgcctctgcaggaagaactctcttgcatgggcacatctcagctcctcattgagggatagttttctttgataagaaacctggagtccatttactctgacctctctttaaatctatatccagagccactagcccaggaaaaacttgggtgacccgtaatttctcttctcctgctgtccttttgctcttacgccccaccccaactccccttaaattttacaggcttatgacagtttgtatgtgctcagccaatgagcagaaaacctggaaagaatttctggactttagcccaccagtttgtctggttgactaacctgctgagagctaaaattggcacccattgccccgtgccttcaggcagtctcctggggcagagtatgccaccatccgaatatcaggcactgagtgggatgtgggtgatgctcacatgactggctagagctttggggggtggggtgggggttactactattttttggccatgatttctttccccttccttttttttttaattaaataaatggatcaaattaaataattc

SEQ ID NO: 357 - DNA, 1123 bp, Homo sapiens
ttgaagcctccgttcagggcctccaggggacggggttgctggtctcctggtcgcaccaagaagcatcgtttggggttcagttttcgtgcaaacaacttggcggcttcccaggaccgaaggtcatcccccaaccagaatacaatccgccggaactgttccaggctccgcggcctccaagctgtagctatgacggcgcgcgggactccgagccgcttcttggccagcgttctccacaacggactgggtcgctatgtgcagcagctgcagcgtctgagcttcagcgtcagccgcgacggcgcctcgtctcgcggcgccagggagttcgtggagcgggaggtgatcgacttcgcccgacggaatccaggggtcgtaatatatgtaaactcgcgtccgtgctgcgtgcccagagtagtggccgaataccttaacggggctgtgcgcgaggagagcatccactgcaagtcggtcgaggagatctcgacgctggtgcagaagctggccgaccagtcgggcttggacgtgatccgcatccgcaagcccttccacaccgacaaccctagcatccagggccagtggcaccccttcaccaacaagccgaccacgttccgcgggctacgcccccgagaggttcaggatcctgccccagcccaggtgcaagcacagtgaagagttgccccaccaactgcagccccaggctttggactgttactccggtaaaggtggttcttcccctttgggattccaagcccaggcaaatggaacccatcaatgggcaagttgacagaggttctgcttgggataatgaagagctgcctgtttctttccagtgcctgcttctgggggcagtgaccttgtgaaccactcatttttatgcaagtggcatccctaaaacctgagatgaggaagacttcaagggttttacaggacccttgttttttaaatccaaattgataataatgatctcaaaacacagtgagaggtctgaaggctggcttctgaagaatccctgatgtcttattggaacaaccactgagctacggagagctctgctgtgatgggctaggcactttatatctgtgtgaatacagatttataaaacaggttaataaacttatccaaggtc

SEQ ID NO: 358 - DNA, 382 bp, Homo sapiens
ggggatctctgagccaattcaagccatgcagaggccaaagggattaggacttggatttcctctaccaaaaagtacttccgcaactactacccccaatgcaggaaaatccgcctaagaaaagcaaagaagaaatgttttacagactttattcactatgtcccattgttctaaaatgataacatgacttctgtttttgaagcaaaaatctacattgcctcaaacacatcactctagcttccttactgcatacagtcctgccatagtgagagaaatgggatttcatcacaattcatggtgctaaaatgaaaacctctgcactttaatttttttcagtaatttccagctatttctaggtataaagagcagctcgtttctcttattt

SEQ ID NO: 359 - DNA, 1274 bp, Homo sapiens
ctgcgaatgcggatcaagcttacatataatcacaagggctcagcaatgcaagatctagcagaggtgaacaactttccccctcagtcctggcaatgagggtttggcaccattctcattctttatcccactcaatcaaaggaactctgggaaggaggttgtgattgctggcaagtcccccccaactgtaccacgggcatgaggagctgaagagaactgctgaggaggattttcctaaagttactgctgaccttgaagcattgttaaagactaatgtcctctcctccactgttgaggctggctgcttctggaggctactttgcactcttcctcttctcctttttccgcacttctccacccctcccacatttacagccagaatcaacattccctgggcccctgaggaaataagcagctggtctggaggagaggactgcaatccatggcgaaaaaacactcactttgtctctgcagcaaagagttgccccttctttctactgttgtttctctgtggactgggcaaggtggggtatttattcctcactagctgggttaccatcttcaggcacttttaacatctggcattcggaatggaaatgtaataatggacattagggagccctgcctttttctactggttcccccaatgtttgaaagaggcattaggctcctggtagccttttctgtgcattgctgtatacacacagaacacacacatgtatgtttggttaccaagaactggtcagaccttgcgagtttatttgtaaacactggacagatggagttaaaaaagagcttttgttgagatttggcatgaaggatatggtgctctatttgtaatagaaacttccaaggctcttccagctcccctttctcgccattctttagctgtagtcatgaatagtctccatgattttcaaaattgattccctttaaagtgcaaaatggtcaccttctaaaagatatattcatagttattaatgaccctattcccaccacaaattttaaagtgctcctaagcccataacttgcctgtttgaactatggtaatgggtggaagaggagttcaccagtttcaaagatcagactctgtatcaaaagtacctttgcccttaggaagagtgagtattggagtcatcttatctattactccaaacctccctttttatttcttgagcctggcttggaccttggcattccgtttgaattccttctaactggaacatttgtgttgtatctgtaacactggcactgaaataaagaccacacggttaaag

SEQ ID NO: 360 - DNA, 571 bp, Homo sapiens
aggactcggcggcccccgggccagtgtgttcgacctgaaggccatcgcctccctgctgcggctgccagacgtcccgaggatcttcctggtgaaggtggcctccaactgccccacaggtgacccagggcctggtcatcgggcagctgagcagccacttctcggaggaggtgctgctccgggccagcgtgctggtcttcatcgtggtgggcctggccatggcctggatgtccagcgtcttccacttctgcctcctggtgcccggcctggtgttcagcctctgcaccctcaacgtggtcaccgacagcatgctgatcaaggctgtctccacctcggacacagggaccatgctgggcctctgcgcctctgtacaaccactgctccgaactctgggacccacggtcggcggcctcctgtaccgcagctttggcgtccccgtcttcggccacgtgcaggttgctatcaatacccttgtcctcctggtcctctggaggaaacctatgccccagaggaaggacaaagtccggtgaccgctgcccagacacagactggcaataaactcctactaaatccc

SEQ ID NO: 361 - DNA, 974 bp, Homo sapiens
gggagttgtagcttcactcaaggagagtttcgttttctttttctttctttttttttttttttgagacagggtcttgctctgtggcccatggtgcagtgcagtgcagtggtgctatcagctcactgcagtctcaaactcctagctcaagcaatcctcctccctcagcctcccaagtaggtaggactacagatatatgccaccacgtccagcaaattttgtttgtttgtagagatggggtcttgctatatttcccaggcttgtctcaaactcctggcctcaagtgatcctcccaccttggctgcctaaagtgctggtattacagacatgagccactgaacccagctgagagcctcactttcatcagctgtgctgtgaggggtaatatatgcttcaggttttctggagaatccttcttgcagagaagtttctgaatgaaacgacagatctctggattcagactccaggcagaagctgcttaacagcaaaaatctggcatcttcactacattttaagattttaggtggaactaagagggatcagatatagaggaataaggaatgtgagaaggaaaaagatatagtagtttagctaaatttttcttagagtttcttggtggggctggccatgaagtaactagtctgactcatttcttctgggaaggctaaaagagacacaaatagcttctcttttaccttggctttaaggaaaagccattttattaacaaaagtattagacacgactgcataagaaatttgctgtgtgagaataaagaacaagggagtaggagggtgggacagagaagggtgagaagttggcttcgtgagggccacctgtcagttgtctttgtgccttgtgacatcaaaactgaaatgtttgtattactgttgtccatgactttttttttctgtgtcagacatacaaattgaatttggttgtaatgttttaaacgtaataaagaattcttacctccccc

SEQ ID NO: 362 - DNA, 593 bp, Homo sapiens
ggcgactttggaaggtttaattggctgggaaatttctatattgtattatcctacaatttgctttttgctattgtgacaacattgtgtctggtccgaaaattcacctctgcagttcgagaagaacttttcaaggccctagggcttcataaacttcacttaccaaatacttcaagggattcagaaacagccaagccttctgtaaatgggcatcagaaagcactgtgagacgcacagacggcgtcttctgccaccaagagacccgagaactccagattcacgacattcctgtcccatgtagaagcatttccattcaaccgtggcccctcttcagaacctagacctatcagtgccatttttttttcataatctacgaagaacttggctatggctgatcttttttaaatttaactttctgatggaccctgtagtttccagttaagtgcagattccttacagacatatagaacagcgcatttttctgtagacatttgctcatgttggtaaatacaatcacccatatgaaaaaattgttttcacctgatatgaaaatgttagaaaaggcaaactccgggacccgattgaattctagacct

SEQ ID NO: 363 - DNA, 900 bp, Homo sapiens
  misc_feature 288: n = a,c,g, or t
tgtataggatcgagccattgatcagtgcttccaaaagacagaagacaaagaaagagaatgggggtttaggtgagaaagattgtctttgatggtagaataggcatctgaagggtaagtactagttataaatgttagccctggacagatgttaacaccagtaaagtctagttacagagtaaaacctcagtttgtttaactttatagaacaaatggagaggaagacagagaatcatttaagagtggactagagagatcagattttgaaatagctatatgcatgtgtttgtntgtgagacagggttttgctatgcccagggtggttttgaactcctggagttcaaacctctggagtagctgagactacaggcatgtgtcactgcacctggctgaaataattatatgttttaaaagaaaactgttgctcttcgttgagctgttagctagtaacagcagaaggaacttcacattaagtgaaccacacaagatttggaagagatttcttcttaattggtaaaattcagttaatgctttgttacaggcccaagatgagagttgtattggaagtgagacgtagataagtatttctctcaattgaaatgatgatgtagcaatgatattatagaaacttttgagaaaatagaaaaaaaattctgcctttctaatacaaccttttcttttttgtaatttttcataattatttatataactatgttttaaagttataaaactggtaagtattatagttgtctattttccttttttgactgaatctaaaaaacacactttgcatgttttcacatttataaatacctttcttagagcttcatactgtttcattgtgcttatgagttatgatttataaatgtgaaaacatgcaaagtgtgttttttagattcagtc

SEQ ID NO: 364 - DNA, 349 bp, Homo sapiens
cgaagtgttccctctggggagccaggtcgtgagaaaaaatctaactctccaaaacatgtttattctatagcatcaaagggatcaaaatttaaggagctagttacacatggagacgcttcaactgagaatgatgttttaaccaatcctatcagtgaagaaactacaactttccctacaggaggcttcacaccggaaataggaaagaaaaaacacacggaaagtaccccattctggtcgatcaaaccaaacaatgtttccattgttttgcatgcagaggaaccttatattgaaaatgaagagccagatgaccctctctttgcacaatagataaaagtctttatatgaatat

SEQ ID NO: 365 - DNA, 7 bp, Homo sapiens
tagacca

SEQ ID NO: 366 - DNA, 631 bp, Homo sapiens
cgcctccggtgagagagcggtctgagcgagtcgctttgtgtaaccgggcagagctaacacctgagctgttaaagatcctgcattctcaggttgctggcagactgatcatccgtgcagaggagctggcccagatgtggaaagtggtgaatctcccaacagatctgtttaatagtgtgatgaatgtgggtcgcttcacggaggagatcgagtggctgaagtttttagcccttgcttgcagcgctctgggagttactattaccaaaactctcaagatagtgtgtgaggtcttatcatgtgaccataatggtgggtcgccccggatcccgttcagcaccttccagtttctctacacgtatattgccaaagtggatggggagatctctgcatcacatgtcagcaggatgctaaactacatggaacaggaagtaattggccctgatggtataatcacagtgaatgactttacccaaaaccccagggttcagctggagtaaaagcacaattttggcaattttaaaggaagatacagagatgattgtacttcagaatgactgaaacccatataccacccaaaatcaattttcttgtacaactggtacacactaataaacaattaaacatatgagatcag

SEQ ID NO: 367 - DNA, 1143 bp, Homo sapiens
cgaaactctggcatccaaatcatgaagagctgcagcaagacaaagttcaccgccagcgcttggcagccaaggaggggcttttgctgtgctaaattaggatttgagggtgtgggaccctcaccgaattcattgattactgaaaattgaatgttttttgggtccacatttcaaggctgaagtgtatagtgtatatataacctttcctatggaaatgtgacattgagtacattttgtgttgctgttgtgaagccattaatataaatctttggtaatgacccacatctctatatgtatgtgttcccacttgtgggagcaggcactaatgaaatcctgtgcctggaatggagatatttaggtacctgaggcttagtgtcctgtggtctgcatgtaagatagatgacatcctagaacaaagaagctgttttaacttaatccccctgatcagcaggatctgcgtgttcagtgacatcatacattctgtatctagaagtctaaaatttctgcctttctcctaaagaatgtgttcttgcattttggttgaaataacctacacagtgttaaaaatcagatacctcctttagtgaccagttcaaattttaatagcgataggtagcccctgagaaatttatcactataactccacaggaaatatgacttggaagtgctctgtgtactaaacaaaataaagcccctctttgcatttaaaaccaaagtcaaaacaaaactcttgtaatgcaattaattaactttatgtcttcccatgactcaagttttgttaaatatgcccaaaaactttgattggcagtttcttcggttaattattcctatagaatgtattttaagaaatctatacaaattggatatatgcttggtaattctccagtttctaggaggtacctatttctaccgtttcaagtgatgaagtgaaaataatttacattcgatagtgttactgataacaaacctacttaagagatatgttgctttttacttaagggatagtgttgatagataaattagaatgtatagataggtttgtgaaagtctaaataatggttgtatagatatgtatatatggttcacatatctggatctgtgtatttgattttgtactttaaatgtgacaaataaaccttttgggag

SEQ ID NO: 368 - DNA, 748 bp, Homo sapiens
agttgtggtttaaaccaggagtgcgccgcgtccgttcaccgcggcctcagatgaatgcggctgttaagacctgcaataatccagaatggctactctgatctatgttgataaggaaaatggagaaccaggcacccgtgtggttgctaaggatgggctgaagctggggtctggaccttcaatcaaagccttagatgggagatctcaagtttcaacaccacgttttggcaaaacgttcgatgccccaccagccttacctaaagctactagaaaggctttgggaactgtcaacagagctacagaaaagtctgttaagaccaagggacccctcaacaaaaacagccaagcttttctgccaaaaagatgactgaaaagactgttaaagcaaaaagctctgttcctgcctcagatgatgcctatccagaaatagaaaaatctttcccttcatcctctagactttgagagttttgacctgcctgaagagcaccagattgcgcacctccccttgagtggagtgcctctcatgatccttgacgaggagagagagcttgaaaagctgtttaagctgggccccccttcacctgtgaagatgccctctacaccatgggaatccaatctgttgcagtctccttcaagcattctgtagaccctggatgttgaattgccacctgtttgctgtgacatagatatttaaatttcttagtgcttcagagtttgtgtgtatttgtattaataaagcattctttaacag

SEQ ID NO: 369 - DNA, 550 bp, Homo sapiens
tggagaagacctagaatttaaagaaccaaaggaacgtgaagatgagtcttcctctatgtttgacgaatattttcaagaatgccaggatgaatgaagagtttactaaaagtaaccatctaaagagcttgtggccaaaccagcagaacattcttctcttcaaaggatgcaatagtagaaagctacttattttaatgaaaaaaagtaaaacttcgttctttatcagcctcatgcctgaatcaaatttttaattattctgaaactgctgctgtttaaagtggaatcttttagtattataacagcatcactttagattttgtaagtcaaaattgaaatgaatgcacatagatttatatataaattagcacctgagctaaggttaaggctggtctaaacttattttcactttttgtattatttttgagatgcaggaattactgtaacaaaatatgtatgtccgaagggaaaaagctgcaaggatatatataagaccaccgcctatctgtatcttcccaatttcctatattgaaaatgtatattatttatataactt

SEQ ID NO: 370 - DNA, 651 bp, Homo sapiens
aaatatacagtcttcccacttcactaaccaaattcctactttccagtgttacttcccaatttatgcaggaaacctcctgcaaagctgaaactgattagaaaattctttatattttaaaatagctctttctcatttttagagaagtcaaatagccaaccatcaaaattaagaataaattgaattgtcacagtccattacagttattgttgctagatccacctcatttgcagatgtccaaacttaaattcatctgttcttaaaatgctacttaaaactttggttgttttcctgtaatataaaagaaaaagttaatttatcaattgattgaatacagtttttactaattagtttatcaaaccaaatactgtgaacgtaccaggtgtttacagatttaaatgcatgttaccatagaaactattaaagtaactagaactgtcaaataacaaaacggctcatgtttttaaaatatatgtaactcattttaaaatatattaaattgtattccaaacctgttcttctgtttctgtggcacctaggtttaaaatatgtattaatgtgtaaatcacaagtaaaatgaattctaatgtacaagtttgttttaaaaagtgtatgtcaagcttttatttacacaataaaatgttattaaagatg

SEQ ID NO: 371 - DNA, 635 bp, Homo sapiens
ggttattttaaatataaatagctaatgggggtggtaggcctataaaattaaatgccttgtataaaatccaaaatgaatgcaaaattgttttcacttgtattgactttatgttgtatgattccaatctctgttctgtttggcacttgtatttaattcttcacctttgtaagacatttgtatattgtggatgtgttcattcaagctatttaatatcttgcactgttaatacacagtactttattgtacagactgttttactgttttaattgtagttctgtgtactttttttggatggggctggcatgttttctttgtttcctggcaatacgacgtgggaatttcaatgcgttttgttgtagatgctaacgtgtcagaatcccttacattcaacttttctaaaaaaagcatttccagtcctgtagtgtgtgctacagtaaccaaattgttgaaaatggtttcaagttattcaaatttgtacaggactgtaaagatatgttgacagcaaaatgttgaaaaaaaaagcctatagaataaaagccaaaaagtatatattaggatctgcaaacaatgaaaaattatgtaatatattgtacaaatgtaagcaaaggccctgaaataaaatgccatagtttgtg

SEQ ID NO: 372 - DNA, 1192 bp, Homo sapiens
cagtgctgcagtaaacatacgtgtgcgtgtgtctttatagtagcgtgatttgtttaagaaagtaacagagcagggattagagtccaagtaatttggctccagcactcctgcactacttaatacatttgtgtgttgtgttagtaaataaatactgtacaaatggcaagataggccagacgctggtgtttcaataaagcaaactcatcttaaccatgaaagtgactcagcttgagatttaattaatattgtttctatgtgtgaggatctttctttttatggcctttggcagtaaaatgatctaagcgtttttatagaatgtataaaatgtggctttttttgtgtgttaaatactttatgaccttgagtttactgatcctgacgaagctcctcttttcctctttttgcccactaaagatccattttatttatgcacacagttaaagccattgtagtgtagtggaaacagcacatattggatttgtgtgttcttacattttaattccagcattatccattactagctgtgtgactggacaaattatacatctttagaacttcccttttctaacctgtaaaatgagggaaattaaatcttcttcattggatagttgtaaggagtaaatgggatgatatattttttaaatgcctgctgtactacttactgtatggcagatattcaaaaaattgtgagtgctttacttcttaataaatgaaacacgtccaaatttaagtacttttttttcccttatagttgctaaattttgtaggtgaactctgtgcttgccaaacacttggtagccagacctttagaatttgaaccagatactatagagttcctaaataaaatatgcattagaagagaaatgcataaattctttatggtagttgtgagactgttttggtgtcttttgccaagaggtatttctctgctgtatcggaggaggaacaatggaaaggaaaacttcagcttctggtgtttcgggagttctatcttgaagggataaatgaatgaaaaaatgaatcacattttagttggacatgtaaaaagcaagtagggaaacttgggaaaattctcacaaaaggtagctttttttctaaaaaatttccttctgatttttcagtaatgatgtagagagctgtagtttacaagctgattttagaaccgtgtattaatgggaaaggccaaagaaat

SEQ ID NO: 373 - DNA, 1279 bp, Homo sapiens
  misc_feature 565: n = a,c,g, or t
ttccaatagtataaaaacattgttagcgactggacaattacctcattcaacaatgtttcaaataatgtattatattaaaatgtagatgctgataagttctaagaaatatttatacctttttatatggaagataatttatatcatccatgtttagtgctttttaaacatcaactttactttctaggtaatgtggctgtgcaatatttttttaattttatctttttacttttctattactttttcatatattttgctacctaagtatttcagtgaaactttaagcccatacctgtgtctgatgtttattattggctttccacaattcttacatcagactacattatattagagaccattattgctagaatagcatgggatttaaaattttctaatactgggggtattatttagttaattatggatttttcttttcacattttactgtgtttttaactgggaaataagattatggctgctacaatatattttttgaaatccacttctgttgttctaaaatacaactttatcattgcaatccaaccaggtagttcatagaaaactgttnttaataccagtttttctataaagtcattactgttgcttaaacatatttcatgcctattaaaatatattttctactggtgatttcaacattatttctcatactgacttttattactggaaatgttcctgtacatgttggcagcagataaagatttttgaatgtttgaatgccctctgccttgatttggttggaatttttgctaaattggtaatgttgcttgaactttatgactacattttcttttaacttttttcatggacttccctatatgtacataataattaaatgttgaaatttatgaaatacttttatgaatttagataatttttaaatattgttaaaatttattgaactaaaaagtaatgtacataaaataattcatgttaaagatggaacaaaataattaactttacatgtttggtgatacagatgcaaatgtttttgatatatggagatgttgagtcttttgactttaccaaaggtgctgaatagcattaaattcacaattttccttttctgtttaactagtgaaaataaaaatgcactaaggttgggtcgaagttctgtttgcactcaccaattgtgacagacagaggtttttgtaagtatttattgtacaattgatgcatgtttatttttagcgttgttattgcctctggtgtaaataaatgaacaaatggctatttgggggaatcaaaaaaaaaaaaaaaaaac

SEQ ID NO: 374 - DNA, 190 bp, Homo sapiens
  misc_feature 4: n = a,c,g, or t
tacntttgcaaatgtaatggtggccgtggtgccatccgagaatttgcagagcacatttgcctactaatggaaaaggttaataattcatgccaaaaatagaaattagcgtaatattgagaaaaaaatgatacagccttcttcagccagtttgcttttatttttgattaagttaattccatgttgtaatgtt

SEQ ID NO: 375 - DNA, 1377 bp, Homo sapiens
tcatggcctacacaactagtggaagtccatgtttagaaaataaatggcttgtttaaggaaaagtttttgtgtccaaagctccttaaagtcagagagatttctacctggtacttaacatcatatggaaattgatgctttagtgagggtgttggctatcctattgtcaatttcctgcatccttttttcttctttatttttgtatagagacaaggtctcgctatgttgcccaggctggtcttgttcctgggctcaagcagtcctcccgcctcggtctcccaaagtgccgggattacaggtgtgagccactgtgcccagcttatccttttttcattacacaaaaagactgaatttggttagttctaagttggaagataaagatggtatgcacaggaggcccttgggagccctcagataactttctcattcttccaaaatcaggctgggatgcattctgtaaattttccctgcctaggatgtatacctgaggaataaggtaaggaagatgtcagcaagtcagcctctggtttacctgctagctggcatggatccttaaggaagcaggagggagttgggaagagaggaaggggtgaagttggtatcttttaaagcgagagtgattttacctcagattttgaagaatactaaggaatccagttgttggggtacatgctattattagaaggatctagataatttgtcctctgagtcatacttgacattgtacctgtggcacatcaatccgcactgtttgatactctggctgaatctcagctttcaccaacattgtcaaaggaccttttttagtgcccagccatgcctaagagtgtgtcatctgaagagggaagcatctgcatactgctgtcctgattgctcagtcctcactacctaccagacccgttggtaaggtacaaaagtacatgcttggaaaagcagtctgcaccaccagtgataagctgtgacagagtggaacagcctcaatgaaatgaaggaaggattgctacagtggcattaaggatggtctcttaatcctgtgttaaccactagattaactttacaatcaactcaaaatccttcaaaggctttccactttctttagtggcattcagaccccctctagtttgacccctacctccaacttgaacctctgttactcttccgtatgaacattttcctctagccctggactactagtaccgaagtcactagtcacataggactcatttgaaatatgactagtctcaattgagatgtaatgtaagtgtaaaatacacagcagatttctaagacagcacacaaaatgtaaaatatgtcaaaaatatttgatactgattacatgttgaaatatatgtgttgggttaaataaaatgcattaaagtt

SEQ ID NO: 376 - DNA, 489 bp, Homo sapiens
gcctctgccatggccctgcagcctggtacactgcaactgataccaaagagatcagcactggaaaagcccaatggtgccaccccggtctttaatcccactgttttccactgccaacaggctctgactaacctgcagctcccacagccggcatttatccctgcagggccaatactgtgcatggcacccgcttcaaatattgtgcccatgatgcacggtgctacacctaccactgtgtctgcagcaacaacacctgccaccagcgttccgttcgctgcaccaactacaggcaatcagctgaaattctgaacagcagagttatggagtatcagaatctttccatggaaacctccatatggcctttctatatatattctcgtatgtcttattctaccaacacaacaataagcgtgttgcagtcaatgtattaagcaaagcaaacctgccagccagcaaattcaaataaaaaaataaagcattaaaaaaaaaaag

SEQ ID NO: 377 - DNA, 372 bp, Homo sapiens
  misc_feature 26: n = a,c,g, or t
cccgattgaattctagacctgcggcngcttttttttcacattttaattgaatatctacagtaggaaggctcttacaatcaatgatgtgtcatggtgtaatttttttttctttctccctaatacataaaataagtggaagttttacaatcattggtgtcttaggatcagtgagatacagcatgattttccccgtgtctcaggcctgcttccctgagtcttccaatggcaggaaccacgtggtggttctcctcagagctctgggctcagcctccagaactgggactgagctaaagagtcactaaatggtcactgagatcaggagcagaattccctgagagttgcttatctctgggaacctgacctgtccaaatt

SEQ ID NO: 378 - DNA, 558 bp, Homo sapiens
agaaagagcaactttgttttaactctgctagatactggaaaacccatggaactaatgaagagcctagggctttttatttgttttgagattgtgccatttcactccagcctgggcaacaagagagaaactttgtctcacacacaaaaaaagtgtaaatcaaaacattaaaaattaagtagtttggaagtagattatcaaaaaggtcctgaaagggaggttctttggctataatctttaacgcaactctacactccctgtatggagacagatttctttctagatggttacagtcacaaagtagggttttcagtagcatttagggatgaatgaatcttgcagcacctctccatgtatcttgctagcccctctgaaacttcaggtcagttagtgcttcctcagaaattgttccccccacaccaagtttccacatttacagttatactgatatccacattgtactgttgtatgtgacacctagattataggaaattttggctatagatcagaaattaactgctatgttttgcctttacgctaaagagattttgtttgtttagt

SEQ ID NO: 379 - DNA, 993 bp, Homo sapiens
atttatcaaatcttatttcttcccactcccccatttgtacagccacagcatgggaaacaaatgggggagtgggaagaaataagatttgataaatagttcagggcaacatgatagaagggcatgtacatcatgctaaaaaaaagtgattgctttttgtggcaaggaagaacaataaaaatttagaaatatttattaggtgtctattctgtgttaataatgtacaaatacattctggggataatgagctgaaaaaggtatatggcttcatgtgtatcacagtgcaacaagaaaccaattcctgagacagaaacaattggtaaaggagcacatttggtcatgcctgtaatcccagccttgtcctcatcgtcttcttttccaccctcctttctcctcaccgttttcctccactgtcttctctaccacactgtcttctccctgcactttctccccactgtcttcttccccacctttctccccatcccactttccaaggtctttcccaccctctccgtcccctcctccccctctccccgcagtcttccgggccccactgtctttcgcccgcagccaacactgttcagttctgaggtatcggcaggggcgggggcggcggcagccgtgatggccctggcagcgactctcctgggtctcctgttggctgttggggcggagctcaggggcccagctcatggggctggctgggcgcacagacacaccaggcgcagggacacaggcgggcgcacgcgtggagcgcttctaggtgaaaggcagttggagagcgcgagaagggggtgggcaagaagacgatcggggcgaagacggtggggagtggaagaggggagaagagggtgcggggagagaaaaacgcggcaggaagtcgctgctgcgagaaggtggggaggggaagaagatggcggagaataagaggctggggaaaaaagacgatgggagggggagagaagaaagtgggaagaagaattgaattctatacct

SEQ ID NO: 380 - DNA, 786 bp, Homo sapiens
gggaagaagaaagttgagctttttccccttgagaaacttctgcatttagtttctatctttccaggcaaaacaaatgggtattcttttcatacaaccattttcaaatgaaccttagaaaagtcttaacatttaaggtattttatgcacagaatacacttagattgataggaaagaactcgtaatggagtttgagtaaagaaaatgactgatgtactaaacccagtaaaaattgttgaaaatgttaaaggtcagcatgttctaattgggaatctagatatagcttagatttcctattggcttagagtatttgctataacaaatgaagtgcaatgacaattatatattcctactcggtcatactggactggcttcgttctcttaatatactcagtaatgactcaagcctctggctattaacataccctagttgccgttttttaattgccatgagccaaatacttcttggtatacaattgatccatttattttaatggctgccttttcattttcatcttttcttgctgctacccatctatgtatgtagtcattggggggaaaatgtagccacattttttatgggaagactttgtgttaaaagtgaacattttgaaggtttttaactggtgaaactagcctggaataatgccaccagagactgagtggaaatcgccccttttgaaggtgccattcttatgagccaaaagtttgtcatttaaaagttcattttgagggaataacatgtaatatgatttgaaataaaggtatggtgaagttgacacgcaaagt

SEQ ID NO: 381 - DNA, 329 bp, Homo sapiens
ggcagcgcagccctgactatactggtagaatgctgggatgggcacctgacaccccctgaggttgcatccctggctgacagggcatcacgggcaagagactccaatatggtgagggcggcagcagagctggccctgagctgcctgcctcacgcccatgcattgaaccctaatgagatccagcgggccctggtgcagtgcaaggaacaggacaacctgatgttggagaaggccgcaattctaacgttactggccgaaccgcttggaataaggcccgtgtgcgtttgtctatatgtgattttccaccctattgccgtcttttggcaatgtga

SEQ ID NO: 382 - DNA, 364 bp, Homo sapiens
  misc_feature 106,107,218: n = a,c,g, or t
gcttgtcagagcagggatttgcatcacagactggccactgcaaagacagatgggaactcacaggttttgtgtgtgtgtttgtggttcactgctgatggacgcatgnnagaagccacctgagccttggcccagccttcatgtggagtgaaaacccagacctgtgtgagcagcaggtacttgaagcaagagaagcaaggccgagccaccagggctttgtnagaggctcctttcttcctggaaaccaattgaacaaccaggagccagaggtcttggtggccggatgtgggtctaatcctggttccatggtctcccaactgagtgaatgaaaaaaaaaaaaaaaaaaaaaatttactgtgtacccggc

SEQ ID NO: 383 - DNA, 590 bp, Homo sapiens
tgttaaatggagacagtaatagcacagattaagttgctgagttatgaagatctgattagattatgcatgtgaaagcaataggccgggcctcctctgcgtaatcttatttctaattttaagagccaggaacccacttttttggagcctgatgttctaatattccttccttacgaaagccaggtcattgcttttttcatctgcctgatgcactgtaagagccttgtgtgttctttcaaaagcgatctctcatatttctcgtttttgggtcttaggtgtcttttcatttggcaatcttcgtcctacagagggctggaaaaactgcagaagacggcatatccaccacccgctgctgggtcggccctgcagctgtgtgcacccaagaactgccaaagaagctgggtcttggcgcggcggaacggaccaatcagaaaaagtttggccctctgcagtttccgtccgctcactaggaggcgctgcggcagcgacggcggcgtcggcggcggccggggctgtcgcgggttggggcggttgggctggcagctgaggctcgtggccatggagtggggttctgagtcgggtgctgtgaggcg

SEQ ID NO: 384 - DNA, 581 bp, Homo sapiens
gcattaaattcatttgtttttatatcagattcacactcttattttaactttataatatttactgatatttagtaggtctaatgtctttttctctttttccttctcttaaaatatttatctcttcttgcctgtttaacatttcaaatcaattttagaaccaatttttcaagtttcaaaacataagcaaacagaaggaaaaacctcaacgaaaccttctggggtttggattgtgtattatttagggtaaggaatatgtgctgctttagcaaatgaacttgaaaatcttttataggcccgggcgcggtgacacatgcctgtaatcccagatacttgggaggctgaggcaggagatcgcttgaaccgggaagcagaggttgcactccagcccgggcgacagagcggcggcggtggggggtgggggggaagcaaaaaacaaattagctgagtatagtggtgcacctgtaatcctagctactcaggaggctgaagcacagggattgcttgaacccgggaggcagagttgcagtgagccaagatcatgccactgtactctagcctgggcaacagagcaagactgtctc

SEQ ID NO: 385 - DNA, 502 bp, Homo sapiens
ctagtatgaatgaaaaaaaaaaaaaccaccaacatttcataaacatgactccctgcagccgatctggtcccgacatgggggtggatcccagaagcgggagacagccttccacggaaacttgcaaaactgcaccaaaatctatcaattttgaaaatgctcttgaattcttggcggaagaaagatgctgataaacacattaagtggggaaatgctcccttgagaaaggctgggttggctctatgaagacacctttggagtgagctgtgcctgggagaaacccatctgtgcttttcccttcattcaccggagatgaggctgagtgttcaagtaaacaggaagcttacctgtggtggtcaaattacaaacactcaacatggcacccatgaataattagaaaatacaagcgccgaagtgacgggggcgggagctaggagggcgaggggaaacagaacaatcttggaaaaatctcggttgttgcaaaaaaagaataaaatgtatgcgt

SEQ ID NO: 386 - DNA, 271 bp, Homo sapiens
aatactagcactgttgtataaaaccctgtttggagtacgcataactgaaaccaaaactctaacaaattttgagagccttgtaaattgaaactacgtgagattgatacttaaatccccaaatgcatttaagtcttaacagaagaatgattattacacctatgagatttttgtcattaatatggctttggtggccagtgggaatgggctcaactcttaaggaaagttagacgccaaagccacaggccatccaatgagacgaaaccctcacagc

SEQ ID NO: 387 - DNA, 1054 bp, Homo sapiens
  misc_feature 1027: n = a,c,g, or t
gtggcgtgggtcgggcagcacaggccttggtgtgtgcgagtgccaaggagggcaccgccttcaggatggaggctgtgcaggagggggcggccggggtggagagtgagcaggcggctttgggggaggaggcggtgctgctgttggatgacataatggcggaagtggaggtggtggcggaggaggagagcctcgtggagcggcgggaggaggcccagcgggcacagcaggctgtgctggccctgggcccatgaccccagagtctgcactggaggagctgctggccgttcaggtggagctggagccggttaatgcccaagccaggaaggccttttctcggcagcgggaaaagatggagcggaggcgcaagcccacctagaccgcagaggcgccgtcatccagagcgtccctggcttctgggccaatgttattgcaaaccacccccagatgtcagccctgatcactgacgaagatgaagacatgctgagctacatggtcagcctggaggtggaagaagagaagcatcctgttcatctctgcaagatcatgttgttctttcggagtaacccctacttccagaataaagtgattaccaaggaatatctggtgaacatcacagaatacagggcttctcattccactccaattgagtggtatccggattatgaagtggaggcctatcgccgcagacaccacaacagcagccttaacttcttcaactggttctctgaccacaacttcgcaggatctaacaagattgctgagatcctatgtaaggacctgtggcgcaatcccctgcaatactacaagaggatgaagccacctgaagagggaacagagacgtcaggggactcccagttgttgagttgaatatgatggagcatcagattttacctaatacagcagaactcctaaaaagttacagccatatgcaggacggcagtactcagcatggtcttatgcacaggaactaaaggaaaaagagatcgagtcacaaaaattcaggaagggggggtaaatgtggattgtntggaatgaaaaataaacattctcaagg

SEQ ID NO: 388 - DNA, 366 bp, Homo sapiens
gcatgagctacctcctcctgcccctggacagcagcaagagccgcctacttcgggagcgtgccgggctgggcgacctggagagcgccagcaacagcctggtcaccaacagcatggctggcagtgtggccgagagctatgacacggagagcggcttcgaggatgcagagacctgcgacgtagctggggctgtggtccgcttcatcaaccgctttgtggacaaggtctgcacggagagtggggtcaccagcgaccacctcaaggggctgcatgtcatggtgccagacattgtccagatgcacatcgagaccctggaggccgtgcagcgggagagccggaggtgccgcccatccagaagcccaagctgct

SEQ ID NO: 389 - DNA, 690 bp, Homo sapiens
  misc_feature 576,595,603: n = a,c,g, or t
tccgaaaccccatgatgtctaagcttcgaaactaccggaaggaccttgctaaactccatcgggaggtgagaagcacacctttgacagccacacctggaggccgaggagacatgaaatatggcatatatgctgtagagaatgagcatatgaatcggctacagtctcaaagggcaatgcttctgcagggcactgaaagcctgaaccgggccacccaaagtattgaacgttctcatcggattgccacagagactgaccagattggctcagaaatcatagaagagctgggggaacaacgagaccagttagaacgtaccaagagtagactggtaaacacaagtgaaaacttgagcaaaagtcggaagattctccgttcaatgtccagaaaagtgacaaccaacaagctgctgctttccattatcatcttactggagctcgccatcctgggaggcctggtttactacaaattctttcgcagccattgaacttctatagggaagggtttgtggaccagaactttgaccttgtgaatgcatgatgttagggatgtggatagaataagcatattgctgctgtggnctgacagttcaaggatgcnctgtatanccaggctgtgggaggagggaggaaagatgaaaaaccacttaaatgtgaaggaacaacagcagcaagaccagtatgatataccaaggt

SEQ ID NO: 390 - DNA, 1844 bp, Homo sapiens
ccgggcggagctggcttgcggctcccggggccggctctccggccggagacatggcccgggggcccggcccgctaggcaggcctcgccccgatacggtcgccatgcccaagagaggaaagcgactcaagttccgggcccacgacgcctgctccggccgagtgaccgtggcggattacgccaactcggatccggcggtcgtgaggtctggacgagtcaagaaagccgtagccaacgctgttcagcaggaagtaaaatctctttgtggcttggaagcctctcaggttcctgcagaggaagctctttctggggctggtgagccctgtgacatcatcgacagcagtgatgagatggatgcccaggaggaaagcatccatgagagaactgtctccagaaaaaagaaaagcaagagacacaaagaagaactggacggggctggaggagaagagtatcccatggatatttggctattgctggcctcctatatccgtcctgaggacattgtgaatttttccctgatttgtaagaatgcctggactgtcacttgcactgctgccttttggaccaggttgtaccgaaggcactacacgctggatgcttccctgcctttgcgtctgcgaccagagtcaatggagaagctgcgctgtctccgggcttgtgtgatccgatctctgtaccatatgtatgagccatttgctgctcgaatctccaagaatccagccattccagaaagcacccccagcacattaaagaattccaaatagcatagcttgtgtgggacactggagccgttgtgatggcagcagaagtgttttccccttaaagccaagcccattaattttgatggaacagcaggacgtacagggcatgtctgaagggcaggacagctggcacggcggacgacccaccccttatcccctgggagtgcttacttttctggtgcagaaagattgttgggaacagacaggaaccaatgtgggaattcaacttcaagttcaaaaaacagtcccctaggttaaagagcaagtgtacaggaggattgcagcctcccgttcagtacgaagatgttcataccaatccagaccaggactgctgcctactgcaggtcaccaccctcaatttcatctttattccgattgtcatgggaatgatatttactctgtttactatcaatgtgagcacggacatgcggcatcatcgagtgagactggtgttccaagattcccctgtccatggtggtcggaaactgcgcagtgaacagggtgtgcaagtcatcctggacccagtgcacagcgttcggctctttgactggtggcatcctcagtacccattctccctgagagcgtagttactgcttcccatcccttgggggcagcctcgagtgtagtccattagtaatcagattccagtttggacagggtggctggattgtatatctcgttagtaatgtacatgctcttcaggttctagggctcctgttaggggagggagaaatgttgaatcaagagggaaaacaactactatgatttataaacatattttaatgtaaaaatttgcatttaaaaggagtggccctgttttctgtgttaaaaccccatttggtgctattgagtttgttctttattcttttatcccagtgaaaattgttgatcttgctgtagggaaaaattaaactctttgaatctccaaacaaggaagtttcagcattcccttatggatcagaggaaccttagaggcctgaaattgttgcttccagtttagctgcccctcaaattcaagtgaatattttcccttctccctttacccttctccagaaataaagcaggtgacagggttttcagaatctt

SEQ ID NO: 391 - DNA, 1259 bp, Homo sapiens
ccagagcgctagtcccaggagctcggaatgttcgtggaacttaataacctgcttaacaccacccccgacagggcggagcaggggaaactgactctactctgtgatgccaagacagatgggagtttccttgtacaccactttctctccttctatctcaaagctaattgtaaagtctgctttgtggcactcatccagtccttcagccactacagtatcgtgggacagaagctgggtgtcagcctgaccatggcgcgggagcgtgggcagcttgtgttccttgagggactcaagtctgcagtggacgtcgtcttccaggctcaaaaggagccacaccccctgcagtttctcagggaggctaatgctgggaacttgaaaccattgtttgagtttgtacgggaggccctgaagccagtagacagtggagaggctcggtggacgtacccggtgctgttggtggacgacctcagtgtgctcctgagcctgggcatgggggcggtggctgtgctagacttcattcactactgcagagccaccgtgtgctgggaactaaagggaaacatggtggtccttgtgcacgacagtggagatgcggaggatgaggagaatgacatcctgctgaatggcctcagtcatcagagccatctgatactgcgggctgagggcctggccactggcttctgcagggatgtgcacgggcagctgaggatcctgtggaggagaccatcgcagcccgcagtccaccgggatcagagcttcacttaccagtataagatacaggacaaaagcgtgtccttttttgccaaaggaatgtctcctgctgttctgtgacctgatttcggagcagctgaagctacataggactgtttttggacgtggaagatagagcaacatagcaagaatgggtctttctcctctgtagtaatatttcaggctggaccggcgactccactgtgaccagagggttgagtgctgcagtgatggcatgccttggctgccctgggccctgttcagaaaacacaagggaccacaatcctgcctttgctgagagagaggctggatgctagacccaagtgaaaggggtcctttggagcctttgtttaaatatgccttagccccagctgcccatttttggttgacaagcctttcagagccagagtgggtatagatgtgccagccaggagatggcaccggatggcaggtgtgcaaggtgacaactaggataatcatggctggaataaagtaagtttccacaccggggg

SEQ ID NO: 392 - DNA, 587 bp, Homo sapiens
acatgaggcaacgattgctcccgtccgtcaccagccttctccttgtggccctgctgtttccaggatcgtctcaagccagacatgtgaaccactcagccactgaggctctcggagaactcagggaaagagcccctgggcaaggcacaaacgggtttcagctgctacgccacgcagtgaaacgggacctcttaccaccgcgcaccccaccttaccaagtgcacatctctcaccgggaggctcgaggaccctcatttaggatctgtgtggactttttagggcctagatgggccaggggatgttccaccgggaattagaaataccatctgccatatgcagcaagggatctgcagactttttttctgccattctggtgagaaaaagcgtgacatttgctctgatccctggaataggtgttgcgtatcaaatacagatgaagaaggaaaagagaaaccagagatgggtggccgaactgggatctaaaatataagctcccggaaggcagggatgttgaagtatcccaagggcttaaaggaatgtgtggcttattgtaggtgttcaataaatatttgttgaatgaatttagcacc

SEQ ID NO: 393 - DNA, 1935 bp, Homo sapiens
tggcccagtgctgggctggaattcggaagtcgcccctctctttccctgcccccacccctgcccctctggctctgtccctgtccagtccctgccaaaacctgtgggttgcaggaaccacagctgtacttcacggagccccagcagctcctggatgtcttccgagagctggaggagcagaacctgtcgctgatccagaacagccaggagacggagaagaccctggaggagctgagccacaccctgaaacacacccagatccgcatggacagggaggtcaaccagctgaagcagtgggtcaccacaatgatgatgtccatcaccaaggaggaggacacagcagctgagctggagctcaaagcccgagtcttccacttcggcgagtacaagggcgatcagcaggtaggctggggatcaaggtggccagaggcccagggtaaggagggacccttgggcacccactggaggagccctgacagcccttgggaagatggaggacaaggcccgggtgagtgccctgcagctgcccttgccctgcctccctccaggagccaccacatgtattgatgcctgtgccagccagcttggttgcccccacgcctcatccattgcttcattcttttattcaacaaatgtgtctgcttcttaaacacatatattgtgtctggcaaggtgatcctgaagggggggaagaggcgtgtcctcaagccaggctgagagggtgagagaattgggagagaagagaaagccagtggtgttctgagcagcagaagccaggacccagacaaaggctcagcccgctcccaacctgacagcctggggccaccctgggcatgggatggcttcctactgtcaagtgcctgctgtgtgccaggcacagggccaagggtgtgggatgcagccatgagcaagacagcgctcccgatacagccagaatccatgggcactggctgtgcccaggctgggctgagctgcctgcctgctgctcctctctcctcatatagcccacatggaggggctgttatctgttttctaagtgtcagaacagtctcagagaagacatagccctgtggggtgcccagggtgcagggttccctggaggaggggactgggccccgttggctcaccagaggcagctgggagaggggctggaaccagggatctggctgactccagggggcccgggggataggctgctctggccaagaaaagccagttccccaagttctgttttagcccatgttctcagagctcccactgtgtgccaagcggtggcccccaccctgggaggtcagcaggccaccgctgaaggcactggcatgggggtgggtttccgcctgccagcaccctgctggaagccacctcctccacaggataagctgctagagagcctgaactgcaaggtgctggatgtgtaccggcactgcaccggcacccagcaggaggccaacctgggcaccgtgcagatgctgaccatcattgagcaccagctggatgagctgctagagaacctggagcacgtgccccaggtcaagatcgagcaggccgagagggcaaaggagaaggagcggcgcatcagacttcgagaagagaagctccagatgcaaaagatcctacaggaggagcatctgcagcgggcccgggcgcgcgcccaggctgagatcaagaagaagagaggcaggacactggtatgccgctcacgacccccagcccacaggatcaaacaacagtctgagcacacactgatggacaaggaggaggaggagctgctatttttctttacttaatcttcgcagaccatagctgttctggctgaaggcttagcaaagatgttggcagaggaagcagagactgggctgggtctcgagtggcccaactgagtcctctctgtctcctgtgtgctcccttcctcacctgaataaattcatgtctctctgg

SEQ ID NO: 394 - DNA, 357 bp, Homo sapiens
ggtggcagtgcagcaggggagggacaaacaaccaagctatgggtgacagaggctctctcctggtgcctgcacctgcactctagtgaccctgggtgccgccagacccttctcttctacaaagaccccagcaggagtgggagggtctgcaatggcatcgccctgtcctgccttggccagaagcctggagctttggtttgaggaggtagagatatgtgtatccataggaagagatctgtcagaacaggcagctgttgagctcggggtgtcttccccaaggcatgtggctcagcagcaagaaaggcaagttgctcctgctggggccctggactctgccttagctccctctgccccgccctc

SEQ ID NO: 395 - DNA, 1201 bp, Homo sapiens
  misc_feature 453,1165: n = a,c,g, or t
cgacgggagtggcggccgcgcggaggaggccaagatggcggcagctgcggcttcgcttcgcggggtagtgttgggcccgcggggcgcggggctcccgggcgcgcgtgcccggggtctgctgtgcagcgcgcggcccgggcagctcccgctacggacacctcaggcagtggccttgtcgtcgaagtctggcctttcccgaggccggaaagtgatgctgtcagcgctgggcatgctggcggcagggggtgcggggctggccgtggctctgcattcggctgtgagtgctcagtgacctggagctgcacccccccagctatccgtggtctcaccgtggcctcctctcttccttggaccacaccagcatccggaggggtttccaggtatataagcaggtgtgcgcctcctgccacagcatggacttcgtggcctaccgccacctggtgggcgtgtgcnacacggaggatgaagctaaggagctggctgcggaggtggaggttcaagacgcccccaatgaagatggggagatgttcatgcggccagggaagctgttcgactatttcccaaaaccataccccaacagtgaggctgctcgagctgccaacaacggagcattgccccctgacctcagctacatcgtgcgagctaggcatggtggtgaggactacgtcttctccctgctcacgggctactgcgagccacccaccggggtgtcactgcgggaaggtctctacttcaacccctactttcctggccaggccattgccatggcccctcccatctacacagatgtcttagagtttgacgatggcaccccagctaccatgtcccagatagccaaggatgtgtgcaccttcctgcgctgggcatctgagccagagcacgaccatcgaaaacgcatggggctcaagatgttgatgatgatggctctgctggtgcccctggtctacaccataaagcggcacaagtggtcagtcctgaagagtcggaagctggcatatcggccgcccaagtgaccctgtccagtgtctgcttgccatcctgccagaacaggccctcaagcccaagagccatcccaggcctgttcaggcctcagctaagcctctcttcatctggaagaagaggcaagggggcaggagaccaggctcttgctctgggccctccttcngcccccatcatgggaataaattaattttctcaatgt

SEQ ID NO: 396 - DNA, 1432 bp, Homo sapiens
agcggtggcggtcgcggctgtggccgggggaagtgaatggttttacccagagggccctgcgccgcctttctccgctggcaacggcgccgctccccgctcctcctccccagccatggcgttcacgttcgcggccttctgctacatgctggcgctgctgctcactgccgcgctcatcttcttcgccatttggcacattatagcatttgatgagctgaagactgattacaagaatcctatagaccagtgtaataccctgaatccccttgtactcccagagtacctcatccacgctttcttctgtgtcatgtttctttgtgcagcagagtggcttacactgggtctcaatatgcccctcttggcatatcatatttggaggtatatgagtagaccagtgatgagtggcccaggactctatgaccctacaaccatcatgaatgcagatattctagcatattgtcagaaggaaggatggtgcaaattagctttttatcttctagcatttttttactacctatatggcatgatctatgttttggtgagctcttagaacaacacacagaagaattggtccagttaagtgcatgcaaaaagccaccaaatgaagggattctatccagcaagatcctgtccaagagtagcctgtggaatctgatcagttactttaaaaaatgactccttattttttaaatgtttccacatttttgcttgtggaaagactgttttcatatgttatactcagataaagattttaaatggtattacgtataaattaatataaaatgattacctctggtgttgacaggtttgaacttgcacttcttaaggaacagccataatcctctgaatgatgcattaattactgactgtcctagtacattggaagcttttgtttataggaacttgtagggctcattttggtttcattgaaacagtatctaattataaattagctgtagatatcaggtgcttctgatgaagtgaaaatgtatatctgactagtgggaaacttcatgggtttcctcatctgtcatgtcgatgattatatatggatacatttacaaaaataaaaagcgggaattttcccttcgcttgaatattatccctgtatattgcatgaatgagagatttcccatatttccatcagagtaataaatatacttgctttaattcttaagcataagtaaacatgatataaaaatatatgctgaattacttgtgaagaatgcatttaaagctattttaaatgtgtttttatttgtaagacattacttattaagaaattggttattatgcttactgttctaatctggtggtaaaggtattcttaagaatttgcaggtactacagattttcaaaactgaatgagagaaaattgtataaccatcctgctgttcctttagtgcaatacaataaaactctgaaattaagactc

SEQ ID NO: 397 - DNA, 439 bp, Homo sapiens
gctatcgcttcgcagaacctactcaggcagccagctgagaagagttgagggaaagtgctgctgctgggtctgcagacgcgatggataacgtgcagccgaaaataaaacatcgccccttctgcttcagtgtgaaaggccacgtgaagatgctgcggctggatattatcaactcactggtaacaacagtattcatgctcatcgtatctgtgttggcactgataccagaaaccacaacattgacagttggtggaggggtgtttgcacttgtgacagcagtatgctgtcttgccgacggggcccttatttaccggaagcttctgttcaatcccagcggtccttaccagaaaaagcctgtgcatgaaaaaaaagaagttttgtaattttatattactttttagtttggatactaagtattaaacatatttctgtattcttcccc

SEQ ID NO: 398 - DNA, 657 bp, Homo sapiens
ggttggctggccctgcttctgggggccctgctgggaaccgcctgggctcggaggagccaggatctccactgtggagcatgcagggctctggtggatgaactagaatgggaaattgcccacgtggaccccaagaagaccatgcagatgggatctttccggatcaatccagattgcagccagtcagtggtggaggtgccctatgcccgctcagaggcccacatcacagagctgctggaggagatatgtgaccggatgaaggagtatggggaacagattgatccttccacccatcgcaagaactacgtacgtgtagtgggccggaatggagaatccagtgaactggacctacaaggcatccgaatcgactcagatattagcggcaccctcaagtttgcgtgtgagagcattgtggaggaatacgaggatgaactcattgaattcttttcccgagaggctgacaatgttaaagacaaactttgcagtaagcgaacagatctttgtgaccatgccctgcacatatcgcatgatgagctatgaaccactggagcagcccacactggcttgatggatcacccccaggaggggaaaatggtggcaatgccttttatatattatgtttttactgaaattaactgaaaaaatatgaaaccaaatgtt

SEQ ID NO: 399 - DNA, 1845 bp, Homo sapiens
ctcaggtgatcatgaattggaggcggaaaagtgtcattggtctgagcttcgacttcgtggctctgaacctgacaggcttcgtggcctacagtgtattcaacatcggcctcctctgggtgccctacatcaaggagcagtttctcctcaaataccccaacggagtgaaccccgtgaacagcaacgacgtcttcttcagcctgcacgcggttgtcctcacgctgatcatcatcgtgcagtgctgcctgtatgagcgcggtggccagcgcgtgtcctggcctgccatcggcttcctggtgctcgcgtggctcttcgcatttgtcaccatgatcgtggctgcagtgggagtgatcacgtggctgcagtttctcttctgcttctcctacatcaagctcgcagtcacgctggtcaagtattttccacaggcctacatgaacttttactacaaaagcactgagggctggagcattggcaacgtgctcctggacttcaccgggggcagcttcagcctcctgcagatgttcctccagtcctacaacaacgaccagtggacgctgatcttcggagacccaaccaagtttggactcggggtcttctccatcgtcttcgacgtcgtcttcttcatccagcacttctgtttgtacagaaagagaccggggtatgaccagctgaactagcacccagggacccagtgtacccagcctctggcctcgtgccctgctggggaagcctcacccagcgaaagccggagaagcggttgggccctggcacacagggctggctcagtgtgcggacagaggagaccactctgctcctggggccagaggccattcaatagcctgccttcgtccgggcccctcctgggcctccccggccaggcacgtggcaccgtcgccttgacaccgccatctcttttctttaaggcttcaggcagcgcgcacaggctctggcagccgtctcaggcaggactgggcaccaagcttgcagccgaaggccttgccccaaactaccagcgtttctgcaagcagcttgaagggctgaccttgcagccgggtgagccaagggcactttgctgccaccactgcgttcccagagaccaagcagcccggtgccgtggccagtgaactcagaggtgctggtggacgggctaggactttggggttaggccatggggctctttctctgaaggccactttcctgacgtactctctgtacataactcagcgtccgcgactgcagtaacagccggccctacccagagtatttctgagccatgaggggcccaccagattggttctgaatcggactcatgcccagcgcattagcatagtaactcctttcagattttttggagggacgtttggaagtggcttactctcttctgcctctttcctacctccaccttctcagatgagccccatctgagcacatccagctgctccttacccagcatctggagtacaggacatagctctctcctgctaccagtctgtgccttagaggtctgttaggcctgccaaacggcgaccagctcccctggagcgagggcaggccccttccctctctttccccagacacctacttgagactcaccaatttctggcctgttcaggagcctcagataagtatttgtacttgagaccacctcacacaatctgtatgggcccaaccctgatctcaaacctccttccctctgcctgaagctgtcgtccttcctatggcaggagggggggggggtcccaggacgtgcctcatacatgacttgagcttgtcagtccactgagtttccttctatgagatcaacgcgaggggcctgtatcttgaattaaagcctactcgcttcctttc

SEQ ID NO: 400 - DNA, 642 bp, Homo sapiens
ccttgaaagcctccttcactggctatgcaccacttgtaattatgtgcacacattttgtaaccctttcatgagaggtgggatcgtgcatatagtgtttgcatatcccagaattgctccctgaccagcacagctttttgggtaagtttaatatgggggtgattatgcttgagaatgttcactggaccacaaggcacctcccatattctggagatgtgtgtgagctgcaaaaggggtacgtgagctccaggaacaggtagcatcatttccatcagctcagccagactctgttgtgcatatgcggcatgctgaggattgagacgagagctacagacacaaagctcaaacagctccagttgttgctctggaggagcttgtagtctgcgtcagtgctacttagagtggggtctgtggaccagcagtatcagcatcacctggacatttattagaaatgcagaatctcaggactcaccccagatctcttgaatccagatctgcattttaacaagatgtccagtgattcctctgcacattaatgtttaagaagttttgctggcatgagccaccatgcccggcctcattttaatttggaatgcatttgttttaaaacattaactcattttaatctttacatgtctaaaaatg

SEQ ID NO: 401 - DNA, 1361 bp, Homo sapiens
gtagagatggggttttaccgtgttggtcaggctggtcttgaaccgctgacctcgtgatccactcacctcgacctcccaaagtgctgggattacaagtgtgagccaccacacctggcctggaaggaacctcttaaaatcagtttacgtcttgtattttgttctgtgatggaggacactggagagagttgctattccagtcaatcatgtcgagtcactggactctgaaaatcctattggttcctttattttatttgagtttagagttcccttctgggtttgtattatgtctggcaaatgacctgggttatcacttttcctccagggttagatcatagatcttggaaactccttagagagcattttgctcctaccaaggatcagatactggagccccacataatagatttcatttcactctagcctacatagagctttctgttgctgtctcttgccatgcacttgtgcggtgattacacacttgacagtgccaggagacaaatgacttacagatcccccgacatgcctcttcccttggcaagctcagttgccctgatagtagcacgtttctgtttctgatgtaccttttttctcttcttctttgcatcagccaattcccagaatttccccaggcaatttgtagaggacctttttggggtcctatatgagccatgtcctcaaagcttttaaacctccttgctctcctacaatattcagtacatgaccactgtcatcctagaaggcttctgaaaagaggggcaagagccactctgcgccacaaaggttgggtccatcttctctccgaggttgtgaaagttttcaaattgtactaataggctggggccctgacttggctgtgggctttgggaggggtaagctgctttctagatctctcccagtgaggcatggaggtgtttctgaattttgtctacctcacagggatgttgtgaggcttgaaaaggtcaaaaaatgatggccccttgagctctttgtaagaaaggtagatgaaatatcggatgtaatctgaaaaaaagataaaatgtgacttcccctgctctgtgcagcagtcgggctggatgctctgtggcctttcttgggtcctcatgccaccccacagctccaggaaccttgaagccaatctgggggactttcagatgtttgacaaagaggtaccaggcaaacttcctgctacacatgccctgaatgaattgctaaatttcaaaggaaatggaccctgcttttaaggatgtacaaaagtatgtctgcatcgatgtctgtactgtaaatttctaatttatcactgtacaaagaaaaccccttgctatttaattttgttattaaaggaaaataaagttttgtttgtt

SEQ ID NO: 402 - DNA, 2547 bp, Homo sapiens
catttgtatcttgaccttttcacttgtttttctcaaatatttcatttctgggccccatccattacagggttaccaggaggcaaattttatctacataaatattcacatgaaaatagtaacttacaaaaaaaaaaaaaataaggcagcttcataacacaattattcttttacacttttaacaatataacttctcccgttcagaataaatatacacccaatgtatggagcaggattcaaagtggatagtggcttgggggtgcttagacagtgttatcgcttgggacctggagtcctgggggaggcagtggtggtcttcttagacatggttgggattttggaaggtttgtttagccctctcctggagttgccttggccccctgcagcgctgctttctgaagtgtcggaacaagcagactgcgtctctaagaggtcaaagtcagaagcgtcacttcctcgccggctgctggctcgactcccggctcgactcccagcccgactcccagggcgactggcagactttttagggtctgcccgattagttttggcacctgtggaggccggggaagaactattgctggtatcaccagcaagggatgtccgactagaatgaaaagttggtgttggtcgtttcaacttgctacctgatgatgggataaccttggttccactggctggggtggctggagaagatggcatggatgtacagctgtggttactctgactagcactggagctggaacgagtaggggaagctgcccgggaagatggtttggaccttcgaccccgtgagcggaagggggtcattccctgggatgctccctctggtaggatgaatttctctctaagttcaatgttagttctacctcgtgctcggcagggatcatttttcactaaaaattcatccaaggccatccatcctccaccaacgcgaaccatcacggtgctgcgcagaatacggaccagccgcaactgctgagaatccccaaactgattgccgaggagaccggtatttattctctccgatctgctccacctgaaacctttttgcacatttgcactgagccacttgtcttgtaacctcatcttcgattttatctgcatcggttgttggtcgatacccatccttgttgggatgaagagcaccacaaattcataataatcaatgtaaccatccccatctcggtcgaaaatgtcagccacagcagtcatctctaacttggtggtggggaacttggatgctaaaatgccatcgataaactcctgacgtgttatcttcccatcctggtccttatcaatgcgccggaagaaatccatcactcgagactttttgtgattcatccaacgcatatactttttcctccagacatcaaagtcaaagttggcaaattctttcaactcctccagccgatccaaggcatcattcagtttcctttgccgctccagtgctaacagccacacctgctgccagcgggcagaaagctggttgatccgtgggttttttgcttcagactgtgaaaggattggcatgggaggaggggttggctgacttagggatttcctgcctccgctgcgggatttctctatgaaaggcgcgtgagtaggctctatgtttttccttttgtatgtcttggtgacccggtccacgtcaggctgtttgcgagtcatctcctccataaatgtctgatgctcagcgataagggctttaactcggtcaatgttctgcgggatggctcctgatcccgctgaatgagggtggtctcagcccactggatccatgccagaagttcttccaggagctcagcattagccaccagttctgacaaggccgtttcaagacgctgctggtgctgcttagcccatgtcaggacctcctcgaagcgagctcggatgatggtgatccagtgtttgatggttgtgatgcaatcggggtggcagacagccaggatgacttctcccatggctactgctgagttaacgtccactcgcttttcttctactttcttcatgaattccttatgggtgtcaatgagagactgcagggcctctgtgtcatcaggaagtgctccccgaaagcgaagcgtttgctctgcttcagaaagccactccaacagcatgtggactgtgtctcgaaacacttccgcttgttttaaggcctgctcaagccggctttgtttggaaacagagagtttacagacagtgtcccagcgagtgctcagttcctggagctgtccttttacccaagtggtgtcatctcgactattctcaatcagctctcggcctgaccgcttcaggacctgaacggttcctgttcgctttcacagttccttctggaaaaccttgtgtgcatccatgaggttcatgacgaggtcaaggtccccgtgcacgggctggtcctcagccagctgtggctccaccttgtataaccagtcaaccaatgcctgcaaagcatccatgaactgacccgaaaagagcagggcttcctccaacttgtgctgccgctccacagacttgccacaaacagtatcccatttattgaattctagacct

SEQ ID NO: 403 - DNA, 1010 bp, Homo sapiens
cacttaggagatttcaacttaacttgaccgctctgagctaaacctagccccaaacccactccaccttactaccagacaaccttagccaaaccatttacccaaataaagtataggcgatagaaattgaaacctggcgcaatagatatagtaccgcaagggaaagatgaaaaattataaccaagcataatatagcaaggactaacccctataccttctgcataatgaattaactagaaataactttgcaaggagagccaaagctaagacccccgaaaccagacgagctacctaagaacagctaaaagagcacacccgtctatgtagcaaaatagtgggaagatttataggtagaggcgacaaacctaccgagcctggtgatagctggttgtccaagatagaatcttagttcaactttaaattttgcccacagaaccctctaaatccccttgtaaatttaactgttagtccaaagaggaacagctctttggacactaggaaaaaccttgtagagagagtaaaaaatttaacacccatagtaggcctaaaagcagccaccacttaagaagcgttcaagctcaacacccactacctaaaaaatcccaaacatataactgaactcctcacacccaattggaccaatctatcacccctatagaagaactaaatgttagtataagtaacatgaaaaacattctcctccgcataagcctgcgtcagattaaaacactgaactgacaattaacagcccaatatctacaaatcaaaccaacaagtcattattaccctcactgtcaaacccaacaacaggcatgctcataaggaaaaggttaaaaaaagtaaaaggaactcggcaaatctttaccccgcctgtttaccaaaaacaatcacctctagcatcaccagtattagaggcaccgcctgcccagtgacacatgtttaacggccgcggtaccctaaccgtgcaaaggtagcataatcacttgttccttaaatagggacctgtatgaatg

SEQ ID NO: 404 - DNA, 946 bp, Homo sapiens
gatttacagcttagacacatcaagagacctgaggggcggaagccgagcgaagtggcgcacaagagcatcgaggcagtggtggctcggctagagaagcagaacggcctgagcctgggccatagcacgtgtccggaagaggtcttcgtggaggcctcgccaggcacagaggacatggacagtctagaagatgctgtggtgccccgggctctgtatgaggagctgctgcgcaactaccagcagcaacaggaagagatgcgccacctccagcaggagctggagcggactcggaggcagctggtacaacaggccaagaagctcaaggagtacggggcacttgtgtctgaaatgaaggagctccgtgaccttaaccggaggctccaggacgtgctgctcctgcggcttggcagcggtcccgccattgatctggaaaaagtaaagtcagaatgtctcgagcccgagccggagttacggagcactttcagtgaggaagcaaatacgtcgtcctattaccccgctcctgcgcctgtcatggacaagtatatcctagacaatggcaaggtccatctgggaagcgggatttgggttgatgaggagaaatggcaccagctacaagtaacccaaggagattccaagtacacgaagaacttggcagttatgatttggggaacagatgttctgaaaaacagaagcgtcacaggcgtcgccacaaaaaaaaagaaagatgcagtccctaaaccacccctctcgcctcacaaactaagcatcgtcagagagtgtttgtatgacagaatagcacaagaaactgtggatgaaactgaaattgcacagagactctccaaagtcaacaagtacatctgtgaaaaaatcatggatatcaataaatcctgtaaaaatgaagaacgaagggaagcaaaatacaatttgcaataaactttggatttttcat

SEQ ID NO: 405 - DNA, 3028 bp, Homo sapiens
ctctgtgcacaagagaaataactgatgaagtcaaaagacacactttcctttatacatagcagttaaaagtaatgcaaacatcacatgacactttcagtgaaagttacatttccaattacaaatcaaaatgcatattagggtctctttatgggagaagctgagaaggaagtcttaggtaaaaagcactttcctggcattactacactgatccttcaggctgcacaaagattaaggtcatatacagtcaatctgcaaatgttgacacaatgttacactgtaaattttctgtacaattaaatgtatacttagagataccaggataaacatttctactatattttaactgaacttgcctagccaacattttcactgagaagtttatcaaagatgctgtaagattctacaaaattgtgagacataactagctccagaaacatttcttgtattctttctcattttggttacacatattacactcagattctactgtaatatttttagatgtacagtgccaattgtgcttactgtactgtatacaaatatagcaaaaaagatcaatggtataaatcttacagcattttgctagcaaaaatacatgccaaagtcacaataagcaatatcgtaccacaaattagagagcttcaaataatttgcttctgtttttaatatcttcattctacattaaattactatcataggctaatgtttaaaaatgcaaataaattggacatctgtaggacaacacttgttcacccaactgtgaaggttgatacctgtttccaaaaatcacaataaatgcagaataaagagaagtgtttgcatgcaacacttttgagtgaaacagcattgattcccaccactcaaaacggctaaggaaggaaactaaaggaaataaggaaggaaggaaacaaagagggagggagtggggagacaagaggaagggaaggtaggaaaaataagcaaaggagaaagggagtgagggaagtaagagggagggactccatcttaaaatgcatcatattagacttacaactagacagatttaaaagaatcaaaatgaaagttaagaacgattttgtgtgtgtgtttaaagatttaagagccattatcaaaaataagatacatttttttttccaggtacagaaatgtgattacgatggctgggagcccagcagcctttcaatggctgcattgatgtcgcctcctgttgctattagggcctgcaagtttgcttcacgggttaagaaccccattgcgttgagctgttccagttgttgctgaaatctgacttctggattcggcagctgtggagcatttgctccagccagggcctgcaccatttgctgaatgaactgctggttgggtccagattctgatgtaggactcgtggtttcactaggtgcagcgctggacacagtaggccctgtggggccaccagagccggtggagccagggggggctgcagggccagtgggtcctatgggcccaatggggcctatgggggtaaaagggactatagggcctatggggcctatgggggtgactgggcctacagggcctatagcggttcccagcacccccacccccacacctggagtgaagctcggaatcaggccaggtgcttcagtggctaatgtctgtagcccctgctggatctgcattaaagcctgcattgctcttgggtttgacatggctgatagtgtgtctggattctgcatctgctgcagaaaggctggaagctgtggccgcatctgctcctgcagctgaggatttgcagtaaacagcgggctattcagcatcatctgtgcagccaaatctggattctggctcagcggactgcatcatgcttctcatgtagggcgccgacagcatattctgaatcagctgggggttttcagttatctgttgcagcaggctctgcatgcctggggtactaaagatgctggcgacataattagcggcagcaacggtgttcccagtagcattgctggaactattgccagacccactaccagtgcttgtggtcgtgctggtagttgcagaactctgggtagctggcggtggtgcccatggattgggtagtggatcgcgattttctgtgcgggaaggctgcgtaccttccccagaggaggaactactccccacggaggcaaatggattacccccaaactgctcttgtgcggcattcagcatcggctcttgaatgtcagtgtacatgcgccgtaaagcattatagccacctgggatgctttctagattgctaagagccaggtcttgatttctcatcatctcttgcatcatggctggattcctggcaatttcgagtgtctgcctcattatgtctgggttgttgagcaggtgactgatttctgggtttctctgaatcaattgctgcatctgtggattagccataatgagctgcctcatcagatcgggattcgagagcatgctctgaaccaagggattttccattatttggatcatcatctcagggctggccataagctgctgctgcatctggctctggagctcagagaagttggtcgagctcaagcccaggctgctaaggcctgcaagtcctcccaggctccccaacccaaacgggttgctatttgtggaaataggtgtggagttactcctgggagtcgacgccgaggtagtgttagttcccgcggcattgctaggctgcgtggactggccctgaggtcggttctggcttttgatgacaaggtgaacagtcagcccatcatggatgccatgctggatcaaggtatcttgatcttttaagatttttccggcaaaaatcagcactagctgatcggtttgggatttgaagcgtttcgaaatcgcttccttaaactgctgaaccgagctgttctcgggcaccgcgaactcctctttctctttgggagtcttcaccgtgactttgatgattttaggctcagccggggcagcagccgagccttgggccgcagcagggccgcgggaggggcgcggggggccgctgctctcgccattctcagccatg

SEQ ID NO: 406 - DNA, 329 bp, Homo sapiens
aacaagttcactttccagcttataggcaactttatacagacttgaacattttctccagttgtttagtaaaagtgaaagagaaagggtttttcctgccacaggatataacttttttttatataacaagcataacacaccactgcttttggtggaaaagtgcagaatagtatgtaccttttatgaagaaaaatgtaatttacaatattcagtgagaatgttactgctgattttcttttccaaggtgtagaatattctttgatttatagaattcatttttgacccagatgatggttcctttacagaacaataaaatggctgaacattttcac

SEQ ID NO: 407 - DNA, 1622 bp, Homo sapiens
gcaggcaccatcaaagagttgagggctgttgctcttaaaaattattttttttattattattttgaaagtatggaagttttccattcactggggaaaggagggaaaagtgcatttatttttatacagagttacttaattacctccaaaacacatatgttggaaatcgcttttgctggtgcaaagtatattaatgagcaggaatacatacattgaggttatgaatagagagctcaatttgtacctttgctgtcttgctcaagcttggtatggcatgaaaactcgactttattccaaaagtaacttcaaaatttaaaatactagaacgtttgctgcgataaatcttttggatttttgtgtttttctaatgagaatactgtttttcattacctaaagaacaatttgctaaacatgagaaatcactcactttgattatgtatagattacataggaagaacaatcacatcagtaagttatagtttatattaaaggtaattttctgttggctcataacaaatataccagcattcatgatagcatttcagcattttccaaggtaccaagtgtacttattttgttgttgttgttgttgttgtattttagaaggaattcagctctgatgtttttaaagaaaaccagcatctctgatgttgcaacatacgtgtaaaatgggtgttacatctatcctgccatttaaccccacagttaataaagtggctgaaaataatagtagctctggcttggtgcttgacctggttaaatactgtcttaaagctcatacaaaacaaataggcttttccataagtggcctttaagaaaacatggaagacaattcatgtttgacaaatgctgacagggtgaagaaagcccagtgtaaaaatgaatcgcgttttaagtgattcggttaaagagtttgggctcccgtagcaaactaatactagataataaggaaatgggggtgaaatatttttttattgttgaatcattttgtgaatgtccccctcaaaaaaagctaatggaatatttggcataaagggcatttggtggttttatttttgtttgagggggattgtcagaaaatcccttttctctcttacgtctaactgactagggaacaattgttgatatgcatagcattggaatacttgtcattatatactcttacaaataacacatgaagcaagaatgaccaatattctgataattggcactggatcacaaaatgtgataaaactttaaatgtataaaactttatcaaataaagttttattttcccctttaaaatgtatttctttagaggcattacttttttaaaaatattggtcaattcctgacataagatgtgaggttcacagttgtattccagtattcaagatagattcctgatttttcaattaggaaaagtaaaatccaaaatgttagcaaaacaaagtgcaatattaaatgtttgctttatagattatattctatggctgtttgtaatttctctttttttccttttttatttggtgctgaatatgtccttgtaggctctgttttaagaaaacaatatgtgggaaatgatttaatttttcctattgctcttccttgtggaaaataaagtgttttgtttttttctgttttgt

SEQ ID NO: 408 - DNA, 1202 bp, Homo sapiens
tttcattttcttctactccatggaaacgagccttttgagcttttgcttgtctgctgatttgtccggtgatccaggtttcccctcaaaaaacctataaggcatggaagtattttgaaccgagagtcaccaacagataagaagcagaaagttgagcgcattgcatcacatgattttgaccccacagatagctcctccaagaagacaaagtctagttcagaggagagtagatccgagatatatggtcttgttcagcgttgcgtaatcatccagaaagatgacaatggatttgggctgacggtcagtggagacaatccagtcttcgtacagtctgtcaaagaagatggagcagccatgcgggctggagtacagacaggtgatcgaatcatcaaggtgaatggaactctggtgactcattcaaatcatctggaggtggtgaagctaatcaaatctggttcctatgtagctctcactgttcagggacgcccacctgggtcgccccagattccacttgccgactctgaagtagagccgtcagtcattggacatatgtctcccatcatgacatctcctcattcacctggagcatctgggaatatggagagaatcactagtcctgtgctcatgggggaggaaaacaatgtggttcataaccagaaagtagaaattctgagaaaaatgttacagaaagaacaggaacggctacagttattgcaggaagattacaaccgaacacctgcccaaagattgctaaaagagatccaagaggccaagaacacattcctcagctgcaagagcagttatccaaagccacaggctctgctcaggatggagctgtagttacaccctccagacctttaggggacaccctaacagtcagtgaggcagaaacagatcctggagatgtactgggcaggactgactgtagcagtggagatgcttctcggccccgtagtgacaatgcagatagtcccaagagtggcccaaaagagagaatttatctagaggaaaacccagagaaaagtgaaacaattcaggacactgtgagtatgaaatccatgcaatgatagtgctgtctttggctttccttatacttaaagtatggtatagacacatctgatgtttacatattttattttttattttttggaaaaaaaattaaaatttattaaagaaacttaataaagatttgaataagtcaagag

SEQ ID NO: 409 - DNA, 425 bp, Homo sapiens
gtcagctccaggacccacagggccagaaccagctgggagaattggttatttgagatgtggtactgcttcctcacaagtctcccacaggccatgtaaagggtatttttttgtggcttgctgtgttgctgagatcatcgtatgcaacagctgggtaataagactagcatagctcaaactatcctgccaaacgctctcatctgatttttcctcccttctcccccaacctccaatcaccctgagtcacctgtaaattcatttgtcattcaaagcggaataacaagttgtccctagcaaaaccgctgagcgctttataattttgtggtgtatttttgtcagtaggtagcagaggcggaagtattttttggtgtaattcttgaaattttctgacaggaaacaaataaagatagatgtgtctgagagtcttg

SEQ ID NO: 410 - DNA, 907 bp, Homo sapiens
tcccttctgacacttcttcctttgcactgtacactttcttgtctcatttgttgggggacataggttaccctttgctgaaggatgctgtattatttctcgacccgtgtttcagtccctcttttgaagccacatgtttttcccttcttcgtgcatggactccaaggattccattcactgacctcacagtgcacaatactgacacactccatagtatggttgttggcttccaacccttctgggcaattgtcaaggcactttccaaggtgtaagtaaaatccacttttacattttgtgcagaaatttttgttgaaacaggtatcacagtcagctttgcattttgtacacttatttatatctggatatcgagttccataatatccacttggacatgaagagagacatactccaatctgcttcatgccaattctttccagagcaaaaaatagtctgggcttacatgacaaacatccattgtaatctgagcatgttgcacagcctccttggcagccttgactaacgttaggatgcattcttcgctggcgccttccccgggaggcgtttggctgccgatgtattccataaagttcaaaatgataaaaagccaagaaatcagtcgcaagtgcatagtaacccagtaatgcttcccttcctttctcctctttcttttgattgttaattatatttaatgtatttaaaatatatgtaggtgttaggcgtatatagacagtgcccgagcagcgggacttctcctctcacatccgataggcgtgctgtgatggcaagcgaagtggggcgggtggacagggaaaccaactattgtactttcaaattatccaagcactgaactgcggcggcttcgctggggtggctggcatcgccgcgaaccggggttccaggagccgccggg

SEQ ID NO: 411 - DNA, 559 bp, Homo sapiens
aatgattatgatcagaagagactgtttctgggcccgtacaaaggaagatccacagaactcatcccacggttaaaaggagtcctcactaatccaaattgtgaatttgaagccaactacgttgctatccacacccttgccacctggtacaaatcaaacatgaatggagtgagaaaagatgtagtgatgactgacagtgaagatagtactgtgtccatccagataaaattagaaaatgaaggcagtgatgaagatattgaaactgatgtactctatagtccacagatggctctaaagctagcattaacagaatggttgcaagagtttggtgtgcctcatcaatacagcagtaggcaagttgcacacagtggagctaaagcaagtgtagttgatgggactcctttagttgcagcaccctctttaaatgccacaaccgtagtaacaacagtttatcaggagcccattatgagccagggagcagccttgagtggtgagcctactactctgaccaaggaagaagaaaagaaacagcctgatgaagaacccatggacatggtggtgg

SEQ ID NO: 412 - DNA, 1555 bp, Homo sapiens
  misc_feature 1123,1280,1367,1553,1551: n = a,c,g, or t
agtgtctccatctgacaaaactaaaaatgatgatgatattatggatccaataagtaaattcatggaaaggaagaaattaaaagaaagtgaggaaaaggaagtgcttctgaaaacaaacctttctggacggcagagcccaagtttcaagctttccctgtccagtggaacgaagactaacctcaccagccagtcatctacaacaaatctgcctggttctccgggatcacctggatccccaggatctccaggctctcctggatccgtacctaaaaatacatctcagacggcagctattactacaaagggaggcctcgtgggtctggtagattatcctgatgatgatgaagatgatgatgaggatgaagataaggaagatacgttaccattgtcaaagaaagcaaaatttgattcataataatggcaacggcctaggatcagtacctgttgaaaaaactggttctccacccctcccccatacaaaatccacaacaaagcgcagtggtctcttgtgaatgactgacacagatcagcctcttacacttgacttctgctcatcaagtgccaattcaatggagcaggaggaggggatatcatatatttaggggaaagacttaagcctttgagctctccagcttggaccacacattgcccttttctcagggaaggaaatggaaacaaaaagccaacagggcaggggttttgtaagtggaactctggattgactggtcagttgctacaatcagaatatgctttcttggaccatgtttgagactcagaagaatgggcctttctgccataattcttcactagtcaagaatgccagcagtttctttgtataaagagacctgcctttaaaatcatacattctgaacattttagtcaagctacaacaggtttggaaacctctgtggggggggggcgagtataaagtttccctctttttttaactgttccctttgcccttcaaactgcggatatttttttttttaagtggggacttctccctacttgattaaagattgagtggatttctagatgtggtcatttgtgtcatattttttttgttttattttgtttttgattttttttttcctcccctgagtgtgtgcttagttgttgtgtntatatatttgggaccattatatctttttttgttgtgatatatcctatcgttgtgctggtgcctgttttaccttgtgtttttttttgttctacatcacggttctttttttgtttagtgttttatgttagttggtatagtttttattgactaaagcagngtattcttactactttgtgcatacttaagctattcttttttgtgtctatattttttatattattttttacatcagcttctgtcttgngtattcggggttatagattggttttttattcttcaacagttttgtttattcttgattcttgtttttcgtattccttagagattctgttatttcttttcttgggggtttgggggttcttttaattttttttggggttggttgttttttaaatttttgttttttgttttattttttgttttgtgtngngt

SEQ ID NO: 413 - DNA, 634 bp, Homo sapiens
gtctgtggcattccagtccaaccatgtgacttatttattctaatttgagggctgcactgtacaccatggtgtcctgtgacaccgtgttccagacatttatggaaggaaaacatcccatataaatgaaactgtcatgctgtgtcctccccggcagcagaagatgtgtccttccattgagtgagggtaaccttatgtccacaaaggatactttgagaaagcccctaaggaacaagcctcagtcccacggtttcagactatttattctctgaacacaagagtattggttaattatgttctcagctctccctgctgttgtatgtgtgcattcactgcaagtaacttatatctttttatttgaatgtattttaaagcagtagatagaataacaaaggaatatgaaaaccatggactgaatggaccattttatgtattcagagagagaagccactcatcattgccagaaataccatgtaaaaattggcagttcagaggttgcaatacttagtatagtaaataaataaacggtcaacattgtgcaaccactaccaaaaagtgtgttgtaatgcatcaaaaatcaacacaattttattcactaatgagtatcaataaaataagttcaaatgatggaaaccac

SEQ ID NO: 414 - DNA, 688 bp, Homo sapiens
cataaagtgcttctttttaatgaaacaaatccaagagatgtacagtcaggctcaagttgtgcagttcacaagcatggaggaaacagacagaacgacagcgttcaggacagtcagagctaacccaagacgaggctggacttgccgccagggggatttcttctggatggcactggggccggggccaccgggctgggcacaggcgcagcaggcacgggcttctcttcactctgccccaggctgcctggcaagtctgtgtccacattttcatgaatatcaccttctcccttcagatctaagaagtctccggagcttgcttcagaggagttccttctctgcagtccagatgactccaagtcttccctgccaccactagacttggcacctgctgacttggcccaagaagcttgattttcttcaggtgtcccaaagatattagaggccattttgttcttcctcacaggttgttctgttggttcatcaaaacctaatgaaaaattggatccaccacctggaggccgcaaaactcgggagctattcctgctgttggggtcgactcccttgaaggtggtggttgtggtcatggcgccgaggagcgaggtaggctggcgccggagcagaacgctcaaagggtcggacccgaggggcgctgggaaactccacacccaacagccgcaattctaacgttact

SEQ ID NO: 415 - DNA, 1156 bp, Homo sapiens
  misc_feature 995,996,997,1021,1098: n = a,c,g, or t
cgcgggccggcgcgagctgaccgagcactcggcgggcgcggcgggactgcggcccgtggcggcgtgcgcggggacctgcgctgactaggtccggggaaggtaattgtattagtctgttttcatgctgctgataaagatatacccgagtctgggaagaaaaagaggcttaattggacttacaattctacatggctggggaggcctcagaatcatggtgggaggcaaaaagcactcctttcatggcagcggcaagagacgatgaggaagaagcaaaagcggaaactcctgataaactcatcagatctcgtgagagtttcccgactttctgagaagccctggtttccccaaagaagtgatttctgatagaaatctgaaggtcatctccaagaaaaaagagatctagtatagtcaatgaattaaagacaagaaggtttccaatcagttctggaggttagaagtccagaaaggtgttggcaggtttagtttctcctgaggcctctctcctttacttgaagactactgccctcctgctatgtcatcgcatggctttttcgctgtttgcacgcatccctggagtctttttcttcttataaggaatccagtcatattggattagagcctcatgtttaagaccttatttaacctaaatgacttctttaaagggcctatctccaaatgcagtcacactgaggactcaggcttcaacatatgaatttctgggaaacataattcagtctctaatagttttagtttgcatttccctaattaccaataggttgaaaatcttttcatctgtttaatagtcactatatttcctattctggaaaattctgaagaatatcttatgttcattttctatttatcttttcatacttatttctcattgttatttaagttcaatcaagttaaataggtttttggagcttgagcttgtatctaccatcttgctaatattacctgttcataagcgtcgattttcttaacaaagagggatnnntgtaaaaagtttttaaatgttgtngatcaactctgttccatagacgtttctgtgataatgggaatgctctcagtgctgtctaacgttgtatccattagccncgtgtttttttgaaaaaatagatgtaaataaaataaaataaaattaaattaaaatttc

SEQ ID NO: 416 - DNA, 569 bp, Homo sapiens
gtctattgtgcaagtggagacattaggagaatttggggtgttttttactctttttcttgttggcttagaattttctccagaaaagctaagaaaggcgacattgactacagcaccgtgctcctcggcatgctggtgacgcaggacgtgcagctcgggctcttcatggccgtcatgccgactctcatacaggcgggcgccagtgcatcttctagcattgtcgtggaagttctccgaatcctggttttgattggtcagattcttttttcactagcggcggtttttcttttatgtcttgttataaagaagtatctcattggaccctattatcggaagctgcacatggaaagcaaggggaacaaagaaatcctgatcttgggaatatctgcctttatcttcttaatgttaacggtaattctcaaactatgtgttatttatgtaatctgatacataatctctttcactgaaatcttgtgatccattctttacctttccattttaataatggttaaaatatttgaaacatttactagtattttttattttatacacactttcttatactacccatc

SEQ ID NO: 417 - DNA, 1281 bp, Homo sapiens
agcacgtgcaggtcagggcaggtcctctgagccggcgcccctggccagcaggcgaggctacagtacctgctgtctttccagggggaaggggctccccatgagggagggcgacgggggaggggggtgatggtgcctgggagcctgcgtgtgcagccggtgcttgttgaactggcaggcgggtgggtgggggctgcagctttccttaatgtggttgcacaggggtcctctgagaccacctggcgtgaggtggacacccttgggccttcctggaagcctgcagtttgggggcctgccctgagtctgctggggagtgggcattctctgccagggacccatgagcaggctgcatggtctagaggttgtgggcagcatggacagtcccccactcagaagtgcaagagttccaaagagcctctggcccaggcccctccccaccagggctttgcagatgtccttgaaagacccaccctagagccctttggagtgctggcccctcctgtggcctctgccctggtggaagcggcagccacaagtcctcctcagggagccccaaggggaattttgtgggaccgctgcccacagatccaggtgttggaagggcagcgggtaaggttcccaagccagccccaacacccttcccacttggcacccagagggggctgtgggtggaggcctgactccaggcctctcctgcccaaaccctttgggatgagttccttttttcccttggacgcccggtgctggccttggagccccccccccccgcggatggcggtgggggaggctgtctttgtaccactgcagcatcccccacttctccacggaagccccatcccaaagctgctgcctggccccttgctgtaaagtgtgaagggggcggctgagttctcttaggacccagagccagggccctcaacttccatcctgcgggaggccttggccgggcactgccagtgtcttccagagccacacccagggaccacgggaggatcctgccccctgcgggggtcgggggtcggcggggacccactgccccatctccctctccccaccaggccagccccagaaggggcagccagctggggtgggaccccaaggctgtccccatctggcttttgtggggctcgggagggggggcagaactgaggggtgggattttcctcatggtggcagcgctcttagcgaaagccttctgttctttgcccccctctcctccccgtagtaaagtggactttcaaattcattcaattggacaatttaataaacccctgtgtgtttaag

SEQ ID NO: 418 - DNA, 580 bp, Homo sapiens
atgaaaatctgccgtggaattaactaataagtagtaacaataaacttcatatttagaatgcaaagtctataaagaataattttacatgatcctcaatatcaactccagtttaaaaagtgttatttttaaaacatttgaaaccaagtactgtttaatttcaatcagaagatgcaaatacatactttgatctatgtttgattttgctaataatatttgaaggagattgcctaccaaggacaaaacaataaatttaaaaatcaaacgatttctccatacgctcatagtcacatatggaattttgagaaaataaagcatgctgtctttaggaatttttatacttctttgtctttcttccttaatatttgcttctagctgctcttggcaatgatgaattgttatgtatgcattaatgttttgcagcccaaaagttgttcacatttttcctatataagatctgtggagtgtgtgtttcaaagagagaactacagaaatgttaaagcaggaaaacctgaatgtgatgtgcacattttcatcccacatggacaatgtatgtgttttaataaatggaattttcagattc

SEQ ID NO: 419 - DNA, 712 bp, Homo sapiens
atttctgtataaatgatcacctgtatttaccttttttttgaaaactatgtacttctgaattcgagaattttttctggcttttaattttacaaaaaattatttctttctaaaattacatttgtgtcttattctttgtatgtatttcagtgaaacaactgaatatactttattccttctaatctttgtctttatagatctataaatatatttacatcttatatcactttacttttattagcatcgattttctctccttaatcttccagtgcactatttatctcattagcttattctaagttaatagtttcccaatacaatgtatattgaatttatagatttttatttctcatttattcaatttacagttagctctttccatggatgctcttcaatttttaagtttcttcctctttaaacactatttttgtctcttattttatcactgaattgatgtaaacattttaaatacaattccaattattattaatttatgtagcatccaatttcttcttactctaaattgtggtagcttattttgtgtgtgtgtgtacttcataacttcttataatttagctgtcatgattgggagacctttccctgtaaatgtcttcaatcaagatatttgtttgttctacttaacctggcacaatattatcaattttgccttgtgatcagccattcgcttctcacgttgataaagcccttgaatctt

SEQ ID NO: 420 - DNA, 608 bp, Homo sapiens
ctttccttctaagacatgaaaggactcacactggagaaagaccctatgaatgtaaacactgtggtaaagccttcagtcgttccagtttctgtcgagaacatgaaagaactcacactggagagaagccctatgaatgtaaggaatgtgggaaagccttcagttctctcagttcctttaatagacataaaaggacacactgggaaggatattctataagtgtatggaatgtgggaaagccttccttggttttatccacctttcagattcttgaaagaaataaatcctgtgaatgttaacgtggtaaagccttaagaagtttccaggctgggcgcggcggctcacacctgtaatcccagcactttgagaggccgaggagggcagatcacgaggccaggagatcgagaccagcctggctaacatgggaaaccctgtctctactaaaaatacggaaaaaaaaaaatagccaggcatagttgctcacacctgtagtcctagctactcaggaggctgaggcaggagaatcccttgaacccgggaggtggaggttgcagtgagccgagattgcactactgcactccagcttgggtgctagagcgagactccatctc

SEQ ID NO: 421 - DNA, 2843 bp, Homo sapiens
gccgctttttttttttttttacttggtaaagtcctcaaagtagattttatttatacatttcttcaaatgattgtggtattttaaaaaatctctcccaaatttgatgacatagggacagtggtgagaacaaagtatccctaaaggaaacaaatatcgattggtgctttcctagctcactgagctaacactcagaagccaatttattctataatcctaaagaaccttaaatgtgggtttgtttgaattggccttctgagaatcattgaaataaaggaaatattacggaaaagagattagtttccaaaaatgtgctgtctttgaaaataagtcttcagacatgtgtgtcggaaaagatctgcaaagcttggtacagtgttaatgtgtaaagagaaccaatcacctccatggactttaaaactcaaaattatctatgaaatactttaaatgacatggcgttaccaacattctttaaagcatttcatttaaaagaaaaatgtaagactgttctcacccttttgaaaagacctaatccctttctaaaccaaaagtataatttgcaagagaaacaacattacaattcactggtaaattaagatttctgaagttgtaagaaatggggccaaaacaagtcacgctcaaaaagggatggttaacacaagaaatgtgctatgagtaaagtgcatgaaagaaagcctgctcagctaaatgaagtagacaaagatcagaagtcaagggtcattcgccagagcggcagcaggctcgaaaaccacactgcaaattctggcatccactggcggtatcagcatgaggaccgttaatgttgtcacagtagtaaaagtattcatcattcagagaaggacatgctgaaaccaaatcctgcaggcctgcaccagttatagtaagacaaccagagagattaaggtgctccaaataaggcagccctcctcccagagtcaaaaccctgagaccatggtctgtgatctgataacatccagataaactgagaaacagaagtacacgtccagtctcttgatcagatttttcactcccaaagtaaattaagtcttttcccctaggcaatctagtccttgctgcttttctacacattgcagaagattctgggagtgatgacatagttcttaaagctgttcctgtacaacaaaatgagtgaccacaatacgcaaaggctggagaagcacaatgctgctgccaacagacactagtccttagtccaacaatgtccttactaaaacaaccagaggtggaacaactaaagttggatgctgtttccattacacaaagactttcaacatttctatgtctccattccacagtatcttcaatatcagccaaatcttcagcatctaacatccacacataaggagaagtgaaattctcagaagaaacaggcttagtccaggggtgttcattatctatttcttctccaatgcccttgttagttaaatcgtgcaaacaggcatactgcttggtggactgcatggtaatgtctttatttttccacgcagttgaagtaattttgcttgtagatgttttcaaaaagccactttgatgagatgtcagaattccaagagctctggaaatcttctctagggccacatctgtgattttctcacaaccagacagatcaagatgccgaagactctggcagcaaccaagccaagaccaactgtcaaatgcagaatctgaaatgtcagtctgggtaagatccagatgctccaggttaggacaaagctctaaaatctgcctaaccattttgctggaaactgcagagctgtatgctaatactaaggtttttacagaagtaccaacatatggtagaacgttatgaattaagccatggagtaaacgtttttccatttgtgcaatgctgatagcaattgattcctccgcagactcttcagattcatcaatgtcagcatcttcatcccactcatgaaaagcacgactttcatctttcctatttttcacccattcatcatcaggttcagtatcaagttcagttgcgggaccactataccagtcacctctggcccaatgaacagggtaaagatgtttccaaagcgatcccgtttttgtcagctgagaccatttcatgcttacttgactgcatcgacataactcttgaggattaagatagctgaaaattgacagcattacctcaggaggaagatgggttatacctgtggagtgttctgacacttctgcttctttatctgacttttcatccacggaatatttaaaaaacttctgtcgctcttcagcatgattccataggctaagacctctaaggagttctgcagtatccttctgagagcagtgttgtgcaatcactttctttttaatatccttaagctcttcataggtaaaatattccattaacatgggctgaaaaacctcctcttcctctttcatgtgaggaagaaaatctcttgtaaaagcctccaatctctctttcagttgttttgcataatttaactgttcatattcattcttaacattcttcagtcccttttcaaagaggctaagcatctcggagagtttattgtcagaatgtacattataaatggtctggctgcgttgttgaagcaaaccaataatgtattcattttcaatctgctcatgcattttgaactccttgaaagtagcatacaaagactgcagaagagcacggaaatcgttgttgttggaaaaattggttttagaaagcttgtcgcagtagaggccccaccagctgcttcatccgccagtgtggggcggtgaagacgtccacttcttcaggaaagggcgccatcgccactgcctcagcctccgcctcagcagcc

SEQ ID NO: 422 - DNA, 382 bp, Homo sapiens
  misc_feature 294: n = a,c,g, or t
atgcccaggaaaatatttaaaagaaagaaaagctatttgtacaaagttttctagcagttccactcagataactttaagggggaaaaaagcccaacgattggaaatggttaagtaaattttggtgtattgctagtgctatcacagaatgttatatagccattcaataatattgatatatgtcaaattgtatgcaaaaaagtgagattcaaaaatgttaataagaacataaattgtgtttactgatacatgtgaaaatttaggtctacattgaaaagaatcagaagataacatgtnattcagtttaacattaggggttctttattttttattgcatacatcaatatttaacagaagaaaaatatcccgattgaattctagacct

SEQ ID NO: 423 - DNA, 2957 bp, Homo sapiens
aaactgtaagagcatagaaatacaaaacttctagggaaggtacttcccaattctactcctttttcaatgtagaattatacaaatattttaaaccatccctattattgaacgatgttcgataaaataaatctatgccattttatggtatttgtaggctaaattgtgttaggtaaacataggcagttattataattacaatgccatcaaatcaacatttattcattaattggatattttgctccctttttcccccattagccaccttctatgagagatacgtaaggatgaagaaatattttttccttcaatataatcataagtgtatgtcatttgcatataatggaaacaacaggtactcttgcaagacaaaccaatgcccatggcagccttagcagtagacacagatgtgcagaggggctctcactggccctctgtctggatcagctgcacagccttgctggtactgtggagcagggagagagcggatgcattcagttaacttctctcatagtcttcggctgacaatggcttgaacatatcttctaaagtttagtgctggcatattttctgtttattgtgggtttctttcctcaatgtatcaaattatgttgcctgtctcagaggtcatagtatcattcatagtctccttgtagattgaaataaatcctgctctcgtgagatatcattcagaatttcttgatgctcctagccacaatgcaatgtatttcccttgatccagtgatttttaatttatttcaatcctcacaaaattgctatatactttgaaactacatttctggataatgtcatgtgtgaagttcactgaaacgttagattaagggaaaatattaattaaaaactatgcttgcccaatattcagttgatattttcaaaaagaaacacattttttagccaagtaggatagatactatatattttaaaatattatcagaactagaaattggatattcatgtgaataaatagcagctaagtatttaaataaaatatataaaaggaaaatacacgatagcgaaagaattttttatctggtattttttcaatagaagctggtgcatcattcagtgttgccattgtgtatgaccagttatatgacatttgcaaataaggactgaagcaaaggctcttcaaatatggtcatagctgaggacacttccaaagtagttgtgcagatcgttgagttctaaacaagtctgacattataaactagtttgattcttacctttgaataagtgaatttcctttaaaaggctgaagcagtgacatttgaacctatccatctgtaataactctttaaatatggtaataatcaacactgcctttttaaaattacagaacatttaatacatatagctataaaagtaaggttggctattaatggacatttcaattcattttgctatgtgattcggctttccagaccaaagagtgttaattattatcgtaatttattatttatcaactttgtttatggagactctttgggggatttgcataatcttcaaaaaaatctttggggaaatacagctctgttcttgaaacaaattacaaataagatcctcacgttattagaggtatacaacagaggaaactagactacataatttatgcatctctctaaggtgatagaatattcttttgaataaaaataactttgcatttctacattttctgcatcagaaccttatagacttgcttttaaattctcatatatcgaagtaaaatcagagaactagtcatatagtttattttgtttttaaggacacatttttatttatttttctttatatttatttttaatcctgtttatctagcttatctgatttactttttctgtttctaatgtaagcattttcataacaaaaaattcatgtgttttgtagtgcctggtcccgtaccagtaaaatctcttcaaggaacatcctttgaaaataagatcttcttgaactggaaagaacctttggatccaaatggaatcatcactcaatatgaggtattgggagaacaaggaagttaattgaaatgtggattgaaggactaaaaggaagaagaaaggaaaagttagagggaaatatggaaaagacgtaaatgaggattaggggattaaaatcattctcctttgttttaatttacagattctttgattccaaaattaagcgtcaaaataaatattttgtatggcatctagaattttcaaattcttaaaaaatgcatgttttttgttgctgttttgttgatttagggaagcaggatagtcattatcagatttacgatggttatagtaataatcacatattaaaaaaccctcattttcctttttataaatttaagaaactcctatcatactgtgatttaggagaagccattgaatttcagttgtttcagagtaaggaataatacccaaaaagcaaaatagattataaagctgacttttctagagcttcatttcaactttgaatataaaacattatcttttcaaatatgagaaactaaaaaagaagaaatgaaagaatcatttaagttacacaaatgtgtagttctgttcctacatagcgttgattagatcataaatgcttaaatttctaatggctacagagtgaattatggaaatgagaatcactagtacaatgttatattttgaaactgtgttcacatatttgaatactatttacatgaaatttgttatataacttgaacaaagtacagaatatgttaataataataaaaatttgttgaaacactttctgtgtttcatatgcattaaagtatatggctataagattttttatgtacgcataatttattgtggtttttttgatggaagaaaatagatgtatattgatttggtcagctataactccggtgtatctgtagatagatgattgattgacatatagacagaacttcagaatgacagaaataacaatatcaacatgag

SEQ ID NO: 424 - DNA, 1515 bp, Homo sapiens
  misc_feature 644: n = a,c,g, or t
ggccaaagaggcctaaaaaaagatgaaaataaaataaaatatatatttacaggcctacaacttttgcctcagactgttccccttttctaagggtattcaagttttcaccttttaagcttcatatcctcagtgcttgtagaatgatgagcttagaggtaccaggtcattgcagttgtttgcttaaagacttattgaaatggttactggcgtaaatacttggccaactcaactttattgcccctgatcttttccatttttgtttccaccttaacctatagcagctcctccaaatgaggaatgctgtaagtaagactcatcaaacagattttaaccattttattatcctgtgtgtccttacattgcttcggtgagatgtttttttcttatctgagatgaactttcaggagcctatttgaactccagactggtgttctggggcaaagagctattagccaaactgattctatgcaggtgaaggatgcactaaagttctcactttagtgagaactttttctagctattccaatacagagttctttcttatagggctattgatattgacaccaaatggagtggcttctcagcctcttaatgtcttaagttagtgcttaatttggaatagagaaaccagtatattttaaaanagaaaaatattctttgtagcaactgtaaattctcccattataacagtgaacagagctccaggtaataacgcataggcatgtcaggttgcatctgtatatttgactacattagtatttagtgacatcaggtggatataaaagaaaacccttggaaagagaactgccttagccatgatttcgttagtagacctatttatgattcaattgcaattttcagataggatgtgaacatggaatttcattgaaaatagtttaattttttatataaaaggaattgtatataatgtgtggcagtgactattttcaaaatcatttttcatcaagacaccaattttctaaaataggcattgcatacacatatgcacacgtatgtgcatgtgccacacattttttgtataatgttgggtttgattataaaagtgttgtcaaatgtattatttatctgcatatagcagtggttggcttttttgaattgaaatttttgcgcattgatgcattgaaataaggaaaattatttatctctgagcactaaacttatttttgcatatttctgtaatattgcagtccccagatccagaacatgggaagttagggaaaatgtgtgattttgtgttttgaattactgtcagaattacatacacaattacaacaaactttttttaaaagacatttcattgtactgcaaaaatctgaatatttatatttcttgtttttttctttatatgttttgcattttaatatgttgagccactggaaatttgtaacagattaatttgttataggagtttaaatgtgttgtcattgtctccattgtctttgtccagagcctattattatggaaacaataaaatttattgtgtcagttgctttg

SEQ ID NO: 425 - DNA, 320 bp, Homo sapiens
ctggattttctgtaacttaaaaaaaaatccacagttttaaaggcaataatcagtaaatgttattttcagggactgacatcctgtctttaaaaagaaatgaaaagtaaatcttaccacaataaatataaaaaaatcttgtcagttacttttcttttacatattttgctgtgcaaaattgttttatatcttgagttactaactaaccacgcgtgttgttcctatgtgcttttctttcattttcaattctggttatatcaagaaaagaataatctacaataataaacggcatttttttttgaacccgattgaattctagacct

SEQ ID NO: 426 - DNA, 2054 bp, Homo sapiens
  misc_feature 1598,2010,2011,2024: n = a,c,g, or t
gctaattttactaatcatataaaacagatgttattaaatataatatctttttaaaaagcacatgctttctctacctcttgagtggtatgcctttttgttattgttacagaatttttcctagttgcatttttctttttattcatttttaatagggttaattccttccaagtttggtatttgcccctaaaagaggacagatggagtcttctcgttttgcctcagtttctacttgggattatcagaatcctcttgtagcattttagacatgcggaattgttcgtagttcagtgatctgggaataggaagaagctaggactgtggtcaataccacttggggaacttgtctctgtgaggttcttcttgtattttgtgaaacaattttttcagcggttttacccactgtggtccaagctcctttctaaatctgttgcccacagcatcaaaaagacgtctgatgttaaagggcaaaactccttactaatgacactagtattttattttgtgtggctttctttatctttaggttcttgaagtcatcttgctgtccctgttgctactacatttcacatagtcagggttcaagtcattgttttttgtagacaagctccttgattactagcacagtctacatcaggggtgtccaatcctttggttttcctgggccatatttgaagaagagctgtcttgggtcacacgtgaaatacgctaacactaatgatagctgatgagctaaaaatattgcaataaaaacctgataatattttaagaaagtttatgaatttgtgtaaggtttcattcaaagcccacctgggctgcatgtggcccataggccatgggttggacatgcttggatggtgtatcttcctggttcctcttgcacaattctcttcaaataataaataatgcagatcagtgttccaggttttcttctatactttgcatgtagttcatctttatgtcataaagaagtcgagtagggtcagatgctttgttttagctgccaactggattctgggaactacttttttttttttttttaattgagacaggggtctcactgtgtcacccaggctggagtgcagtggcaccatcttggcttactgcaacctctgactcctggactcaagggatcttcccacctcagcctcttgagtagctgggaccacaggcccacatcaccacacctggctaatttttttgtatttcttaggtggagatgggattttgccatgttacccaggctagtctggaactcctgagctcaaatgacctcccaaccttgacctcccaaatgctgggattacaggcataagccacagcacctggcttgggcactatattttatgaagggttcttagaacatttaaaagggcctgcgttttaaaaaggcttcctatgaaagaatacaatttgaatctatgtcattcagagggcttgatgttttagagagacagactttgctcattgtaaaaggaacttcgaacaatttcagctttcaaaaaatgaactggctctctcacgctgcttggagattcctatcacagaaaacatttcatggcattctgatgccaatattcaggattactgtggaaggttantcttgcccagatgggaaagtgtcctaaatatcttatctaaaagacattttcagctttaagagtctatgattattttgttttaagttatatgacaaagctttaaatgttgttttgttgttttaaagcttaagctagttgcctctcattgtttacttcccatagaaactgtgtctaatttgaaatttatacacgtttcagtagtattcatgaatcttttctataaatataaaaatgcaatattatcttagttaccatactaaaagaaatcaatgtgaacgcattttgagagttttctaaacatatacacaactttcaaaattcaatgtgtaaatgttaagtatcttattcattggaggatctttcttgtggaactcttgggccttaatgtcaccagtgtccctatttatgtgtnnaggtctatgtatncggaaaaaaaaaaaaaaaaaattttttttt

SEQ ID NO: 427 - DNA, 571 bp, Homo sapiens
gaccggcaatgctgttgatcttactataatgcacaggccacccccaacaacaaacaaattacatagccccaaatatcaataatgccaaggtccaaataacctaaccttccattactgaaaatagaagttcaagaagatagtttataatttaaaaatttttaggtcttaataagttgtcatactttcacaggttttatttcatactaagtaatttatttcaaattttacattccaattacagaaaattttctaagccagtttttgttcttcatgagtattactatcaaggtcacatttttcatctagtatgttttaccctggtacttgttggcagggtcaggactaaggtgagatgcgcaaggcatttgcctcacacaaaatgcacaatgaataaaatgtccaaactttaaataaagacagaatcactaaaagtactttgccatattggaacctgaggcaaaaagaaaaataagtaataatatttaaaattttgatctcttgttcattgtagattttaacattaatttggattggtttaaaacattgcattaaaatattatttaatgtggag

SEQ ID NO: 428 - DNA, 708 bp, Homo sapiens
ttcagataccagttccatcctgaagccctctgttgaacaacagggccagatcctaaagctctttcagggagctcttctctggggctggaacagttgattatgcaaccccattgtgtggagattggatcaactgagttgtgttatttttgttttaagtcaccttgtgcgagaacctcaaccgcacctatcttgggaaccgggtatacccttttctttagcactgctatcctttttgtcttcagcacaaataagatgttcaagtgagcccagaagcaagaagagccattttagtcttcatagctattggctaagagagataatgagctgatggtctattttaaccttgaaagttaaaatgttttttttttcactacaaggtacattgaacagtaaaaggtgttaacggcgaaggtagatattttgatgccttctgtcttttccatgataattgtgctaaacaagttgtgtaaatattttactcagccagagtctcattcatttgctaagcattggggaacattatgtagattgaccttaaacatagggtcctatatttggattgtgacttgtagactcaagctaaccttactgcctctttttcacacttgttgaaaagtctgtgaagaacatagttaaagatctccaactttggaaaatatacatgatgtgaaactggggtgctatgttaaaaataaatgtatgataact

SEQ ID NO: 429 - DNA, 625 bp, Homo sapiens
gtttgatactatatcttcatttctcccatggtagtaataacactgttggaaagagctctcagttggaagttgaagatccaggttctagttgaggcaccagagtttccttgggcaagttgccatacctttttgggccttggtttcctcatctcaataaaatgagtttctgttcctttttggtttgtgtctttttttcagtaggccttctttttcataaacaaaagcttatatagagccccactgtagaaacagaaaaggtgtatgaaacagagttgctgtagttaatgcaggcccagcagctttactcttcccactgcctccttgttgcaaacagagataaactttgtgcagccctagtaacctctaaggtgttgccaagggatttgaacacgactggtgcaggttcatttctgtagcctcttaagtttcaggattttttgctagctattgacaggtagttaacaaaaatctataaaacctgtatactaaatatacaagtagactagtgagtcttcaagaattttgtgattattatccctatatggagaatctttttagatttttactgatatagttgagagattctaagtttggttcagcctgggcaacacagtgagactctgtc

SEQ ID NO: 430 - DNA, 2979 bp, Homo sapiens
gttgtgtctttttttttttttgagactccatctcaaaaataaaaaaagaaattatgaataggtaaattcatatcattaaaaattcatttaaattcacttagaatatttatctttccaaaactgtataaaagattgatataattttggctcacaatgtagttcacataagtaatgtatatttctctgtctctttacagtaaattgttgaagactacttcacaatttccacttcctctggctgttggtgtgattgcttttgggtcagcacatttatataggcttccatgctttgtcttcattcctcttttactccatgcattatgcaactttatgtaagattggacttaaggaatgatgaagataatttatgtgtttagggccagtgataagagggaacacacagatccatcagtatggacagcaagatcctttggagaagacaagtctatttttacaatattgaaaataggaaattagttttgtaatgtttgagggaagtagttgaaacatggttttgttttgtggtgtggaatccatgtagtaatcatttttgaaaaattcatgaagggatatatggtgatcactatcattgaggactcctgtgcatataaaataatctgttttatcaactgttcgagaagtctgatatgagagatttagtagatgcccattatttgcagtctcactgcaagcattctgctcattcatcaaactttttttcacaaaagtaggttattttgaatttgctatagtttacctattaagaaataagtctttaaataactgatgaaatttatagctgtttggtttctcaaaggttaaatagccacagaaagcctttggttagtttttggcagccaccatgaacaaagtggatcttgtcttcttacatctatgaaaatagagctttgaatggtaaggagatatgttttcttggtaaccaatgcaagattgatgggtggaaacatgattcaaacttacacaatttttcttgctatttttcaaatatgaatcttactatatattctcggtgaacatcaggagactattaaagaggtctgctgttaaatgtaaagaaaaaatgctcgtagctatttgcttcctggtattggagcagttcagttgtttagtttataccattggattcaattcattgcaccatggttgccaaaagtgcctgaggtcataatggattgttaaaataactaaattccagtggttggaaactctaggtttgtaccattttttctgctgtgggaaaaaacaacaacaacaacatgatcaaggtaacatcacatttgatgtataatattatactattaatggaatatcagtagacaactgttaacccattagtagcatgagtataaacagtcacctgaataaattggagacattagccactaggtttaacagtggaatcttgatttgcctaggtgacttctgggattactggttgacaaataagaagtacattttatttcatttcagaatttacgtcacttttagctaccagagtaggaagaaggtaatcggcaaggcagaagagtatactctttgccttaggatagcgtaaactcaggttgagacatacccggcttatagagttcttctagatgtgtagactgtaaatgcccaaatcctctcaactaaagttttagtgattccacaaagcctctcatgtaaatttccagtgattccaccattgcacttgtgaatatgtatccttgttagacccagggatgtcctcgagcaccagttttattttatctgccattgcatctggattccattacagcctctcagctgttactgcctgtggacagttacttctgcttactgcctgtagagagttacctaacttctcttctcagttcttcctcaggtcctggctattttggcctcagttgaagggagtcttgctctcatctctgagggttttaagtttgtttgatcccattgttgtcttttctagctttgagcatgtttttcagtattcatattttaacttactgagaacattaaagggaaatgataaactcgtggtggggatatggcagacaggtgcttgtttgtttgagagaagtagcagaagagataaaatccaaagtgctatatgtttcagctggagaggaaagagagagaatttattagattatatacttgtcccatggcataccacgtatatgtttaaatagggattttttttgatcttcagatctgtgcaataatactctgttccctgaatgctattttagaatactatcctcaaaacaccagtggtttcttgaagctaacttgttttaaatgttgtatcaaaagagattgataaaggaatgtataactcagcaaaggatgcttctactgtaaattcccaccattaaaagtactggattctataggtccaccattaaaagttggtatgggacaccaatttaaacacatgggggttagattaaaattttaattttttggttgatattaaactgaaatttatataagtgaggtctgaatcttaaaaaaagtaaatgataaaaatttaatatagttaactgttcactgatatgtctattcatttcatcataacctatatatttaattaaaaatcaaattaggagtctgcaaatcagatgctatcaagcaaattgccatccagggtccataattctttttatatttttatctcagaggaatatatacgattcagtaaattttaatgttccaaattgttctaaaaaaaaaaaattatcaaaagcttccagttaacagttggctaattcatttgcccccaacgaactacctgtttgtgttgtgaggtagcatcaaagactatgattttttgggacagtaggagccttaattcatacgcattccctcttcataggaagagtatggacaacaaaaagggacagatgagtcacctttcattaatcattgactcctggtgttttcatagtatgttaaatgcctgatttcata

SEQ ID NO: 431 - DNA, 2299 bp, Homo sapiens
gttactttttggataagatttattaatctcagttacctactattctgacattttaggaaggaggtaattgtttttaatgatggataaacttgtgctggtgttttggatcttatgatgctgagcatgttctgcactggtgctaatgtctaatataattttatatttacacacatacgtgctacccagagattaatttagtccatatgaactattgacccattgttcattgagacagcaacatacgcactcctaaatcagtgtgtttagacttttcaagtatctaactcatttccaaacatgtaccatgttttataaacctcttgatttccagcaacatactatagaaaacacctgctactcaaaacacaacttctcagtgtcatccattgctgtcgtgagagacaacatagcaatatctggtatgttgcaagctttcaagatagcctgaacttaaaaagttggtgcattagtggtatctgatggatataaatttgcctcctagttcactttgtgtcaagagctaaaactgtgaacctaactttctcttattggtgggtaataactgaaaataaagatttattttcatgctcacttcttaaaagtcataaaaacaatcaaataggatcatgtttattgtcatgtgtttcctggtttctgacctgtgtgcacacccctgtgtgtttataatttttaaattgaattttatatggggtttttatttgctaaaaaccaggctgttgaatcacatttgggaagggtacttatcttaatgactaatgacttaattgggaaagttgaattcttgtaaaatacaaaatccaaggacttcttggatttaatctgattgtcacttcttagcagatcacttttttgataatgaaagttaagcatactgaatgctacttttgattgacaaactggctataatagtctaggggaaaaatccctaaacagataaagattcctaaagtaatggtggcagctgatgtttcagtgaacttttatcttgatgcgtttaaatggaagtaatgccagacctgagatttttaaggcatttttacagcttgtattgaaatgattggagacatggtttctttattagctattttgagacctgtggagttaagcaagacttttaaaaattggcaccatatacatctagttagttcctttactcttatttttttaaataaaagtagtacacatcatttccagggttgtaaatatatttggggcttgtttttggtatggatttaaaaggaggatattaagtattcattctaattttgttatttttctagttgccagagatggttgcactgaaatagaacagggagttgcatacaaagcctaaatgtgtattggatttcgaaaatactaggttggtgcaattggttttgtaccaacctaacatgtctttaggaaagtaccatcatgtggaaggaaacaacaggtgttaaaaggttcaaaggaatgagaaataggaagttactagaacctaactgatgttgaccttagaggtaagattattcaggtatattagtggacctccagtccaatggtatagcaaattccagggatctcaggtgcatgcaattttactttctaaagtaaacacttagaaaatagattataacccagacgttttggattatactgagacaaatatgtaaataagttttagcaagtctgaacatgtaccagcgagatcttcaggttaactaagaaaagcccagaaacttcattatttactgtgctttgtatggcataactggtaacaaggcagtaaaatgatacatatttgaactggaccatagtaattaaatgatttatcaatatcatttgcaagataattgtcaggttgagttaatagtaagtggcagcttcccagaaatttgggttatttggcctaagctgtgccctgggattacctcttcatcttccttgacttttaagttcaaatttggaggttatgtgaagtgattgaaataaatctttcaggctgaggaagtcggtaatttcaagaatatagtgaaaacaaggttgtaatctaaacatgagaagcttaagtttaggaaatggttagaatataaattgctaaagccatcatgattttggccacaaatgaaaatatgaacactggaaatgagcgccatttaaatgagatgctgtatgtaagccaggggtcagcaaagttcagcctgtgacctggtgtgtgtgggtgtgtgtgtgtgtgtgtgtgtgtgtgtgtgtgtccgtgtccctgagttaagaatggtttttaggcttgtataggatt

SEQ ID NO: 432 - DNA, 1257 bp, Homo sapiens
  misc_feature 687: n = a,c,g, or t
catggaagacagtttttccatggaccataccgggtgtagggggtaggggcaggatggggagaggagcgttagattctcttgaggagcactcaacctaggtccttcacatgcgcagttcacaatagggttcttgctcctatgagaatctaatgctgcagctgatctgacaggaggtggagctcaggcagtaatgcttgctcgcccaccgcttacctgctgctgtgcagcctggttcctaacagtctgtggcccaggggttggggaccgctactataggaaacaaagcagtcaatggtgcctcttttctactacaaccggtcagtctgtagcaggcccatgctaggaagggagaagttttacctgtaaatgaagctttatgtatttgattgttacactgagacattaattgctgaactggaggtcattttatagaacttaaagtgacaggaggattgcttactgaaaagtgactggaaaagcatagatctgttctaaatttcctctaggtcctagattgtgggagaaggggaagaactactgctgcagaactagtttaaagggattgcaaaacacagcatttcatgtttatagctcatacatcctgcttttcctgtgtaatgcctttagcacttatgggttggctcagaggcaccaatcctgactgggacttgaggaaagttttgaatnacttacgaatcagtcagtgatctttctggtaatataagcaagtggtggcttttcccaacacctcatagagagtctgtgaatataatctattgtctacaaagatttagactaaattcaaattttacataaatattgtcgacattaccaatttgagggaaaaaatgtgatgctttcaaaatagaatgttttaaaagtatgagtgcccataaatataattccttgtgccactgtaagcatgggaaggattgaaattgctgggccccatggagcaaagtcacatctcttaaaagctcgtttggaatggaccttctcaagtgtaggagatcccttaaccatactattaaagttcctatttttccttttggcttaattggtctgatagcagtagtaagtaaactgctgtcaacatcctcagtttatagtgttgtttgtaatcactttatcctcaccatgtcttcttaatgccactttttctagtaccttctctctttttacattcccctttactttgcatagcacactgaaactctacaaaatgttagtgcatacatgatttagctatcattcttc

SEQ ID NO: 433 - DNA, 893 bp, Homo sapiens
gctttttttttttttttccctgtaagtgtggccactgatgtctttgctactggttttttaattcttatttttattttttagactgccttcctcagggttatccagctatgtctgtaaagcttgcaggttggccaatgattggacagaaattatgctcaaatacctcaagcctataatgcttttttcttttgccaatggatgtgtacgtggattgggaacacgctaaaaactcaagtagtattcatattggccttagctcttacttcctatcaggccttcttgtgactccactgaacatccccttcccatcagctagtgatgcctggagaacttatctaccccttctgtggctgtcttatttccagaatgtccccattaaattactggtagtttgctgcttgcctcaactgggactgcaacctctggctagcagagctgcagcttttttcttttcatttagtacctattttgctatttttattgacagtgctgctgagcaatagttttagctatctgttggaaatcaggccagcccctctggctacacagttattggctcttatggccagattgctctggtaaaacttctgttgatggagtgtctggggacattggggaagaggaggaggggatatggaagaacttccaggcaagaaggcttcagattccctctgtttctaacttgaagtttagcagattatcatgaactaaacacgtctcagattttatatttgcccttggttgatttccaggacccaaaaatggttagtttttgacaattttgttcatttttatatttaatttctggggagaggatttgctgacctctttattctttcacagctggaagtccacttctgttgttattaattttcccgattgaattctagact

SEQ ID NO: 434 - DNA, 807 bp, Homo sapiens
  misc_feature 737: n = a,c,g, or t
taggcctctttggccgaatcggccaaagaggcctatttttttttttaagagagagaggagccactcttgcccaggctggagtgcagtggctaactgcagtctctcactcctgggctcaagggatcctccagcctcagcttcctgaatagttgggactacaggcacaagccactgtacacagctgctttgttatcttctacatatataccaaagggataagttaggaacaccagaaactcagtagtaactcactttaaccttgcttctggggctccaattcaagtgatgctcaatttcaaggtacaaggaaaaccatgagaatataaagtcataatgccatttccactcagatgaaaagatttatctatctttagatactcaaaattattcttggcattttagcacttttggtacacatttcctgatgtaggaaatagtaaaatttcagagcctatggcattggctttcaccacctatgcaattttctacacatctgaaaattaccagtttatctaactccttaaatgttcctctcttcaacaacaaaaaacacaaacaaaaattgctggaagaaacaggaagcatccaggtccaaatgacagcataacagactatgaagaaacagggcttaagtgcccatctagaacaagatggtctagattacaataaggaccccatgggacagaacatcaaaacattcaactttcaagtaaatgtcttggaagtaaacatttaanatttataggacttcctctggcatgtaggtatgatattagaagagtttcctttgacattgaattctagact

SEQ ID NO: 435 - DNA, 442 bp, Homo sapiens
cagttctctttatcaggcaaaaacacgtttattgagacatgaaatgagaatcaggctgaaggaatcatgcagctgaaagatgattatattcatagaaatgaagagatgaaatattcaaagaagatggctactttattgtgagacttaccactttaacctcatatgttaacagcacctaccaaaaaatgatatgagatagagctaaaatactgaaattgcaaatggacaaaataaatcatgaaagtttgtttattatttcttcaataaatatttctaggtgctttgtgattctttcatttagtcattaaagccattgctttactatattgcgttgccactttaaaaacaagttacttgacattgtttttgacagatttcactatattcttatggaattaattgattatttctaaaaggtttgaataaactttgtactccctct

SEQ ID NO: 436 - DNA, 870 bp, Homo sapiens
tgtatagcatccactggcagaagtaatagttgtgcctcagacttgggggttgcatgtggccctgggggagttactacccttggtatgcatgagcggttcctattagcatcagtgggaactcagtactctgtatgtatccacaaaagggaacttgagacccacagttattcttaatttctgatattaacaaccgtacatactgctgaatttaactcaaaatatttcaggtaagtgaaagtggtgcttaatgtagactatagaatgactttcaggtgttttcaactgaaagtatatatccagaactgcatccttatagaaatacaagtaagacttaggataatttgccttcaaaacagttttcctaatctcagcagtatccagtgagtgaagaacacttgactgactcttgggccacctctgttacttactgtactatggaagctcctggtgaatgtttacaattatgggatgtagtatttctatttgtactttaagtcaaatgcttatatgaaatatgtgacaacaaatagagaagactggctctgttagtaattatgcagtatgtactctatttaaggatctgtggtagtataacatgagtgaatgtcattaattttgaagtaataactgccacatgtgggaagtaggggagtaaggagaatgaattccaatctgtgattaaaagtgtaaactatagactctactgtagtacatttcaggatctagaagttttacttttataaagatggtgtccggaagatgttgctaatgtattttacttcaacatagggaacaaactttttaagtatattaataaacctgtatggttagtttttaacagttttttaaaataaactttatggatatgac

SEQ ID NO: 437 - DNA, 655 bp, Homo sapiens
aagaggcctaggctaagggctactatactggacagtacagattcatagagtataaaatatgactttaactttggagatggtgaggtaggcctgtaattatggtactttaaaaattcagaatatttagaaaagcatctaatagaattatccacttgttttccttcatcttcattttaatatgttctagaagtaggatcagcctgttccaatttgccaagcattattaaggaggaataattccataccatgtaaaataccatgatatgctgattataatacattaacaaatttttaagttgcgttcactaaattctgtcctgtttcttcaaaataatatagcttaaattgcatgttaattgtatatcttacctattttgtttttatattattcttacaatataatcatgtatattaacaaacagccctgggattctaatcttcctctgcaactgtcttccaggacttactggcacttattacactgtgataagtggcagaaaagtagaatgaaatattctttttccattagatttgttcttatgtgaccatgtaccaagccagctataaagtattgtatttctgtagaatatggaaaatagtatttgtcttacctttgctaaatgtttgcaatttctaagtaaaccttttatctcct

SEQ ID NO: 438 - DNA, 814 bp, Homo sapiens
tttaaaactgttttattaacttcacaatatataatgagcatctttccatgcaataggtaaaactctcctgctgacagaaacttacaaactgggtcaaaaacaacattcatttagaagctggtaataggagacccacaagaaataggtaacatcaaaacgtttacgacaaaggtacaccacaaatgtgtaagtttaggaagcaggggtctccctattaacttcagggaaaccatcaggattcagggcataaggcaaaactcatcgtgatggtcatggtgagggggatcagtgctgactgcccgcagactatgactcaactgcttttccctcagcttttccatcagctgtctcacctcctccccaatcctttccatattctcctctctcatccttgcctgtggctctccaagcctatgcattatgtcccatctatactgcaggatgggctgcctaacgcggaaccgcctacggtttcctctaggcacacagtattcactaacattcaaaggtagggccaagggctcccctttattagcaacttgctccttttcatctttttcatcattttcctggttgacattttccacgatgagattgtttaacgctcgttcctctttggactccaatactcctgggcctatccttgcagtctcctcctcccgattctcgacgtgaggtgttcgccgcaacacttggccccgcaaacctgctccccctccgcttcctactttcggggccgtacctggcccgcacgtcctcagggacaccgggaacaggtaccactgccgagaagggagcgagcgacggcggttct

SEQ ID NO: 439 - DNA, 450 bp, Homo sapiens
cattgtagtaatggtgatgaatacgttctgccaaattcatccagtctgcaccatcttatagctgcccagcacactcgactgttcatgtggtctctttgtagtgtgagtttggagtgtcctattagcctgttctggttaggaatgagttaacggctctttccctcaaccttagtctagtcccagggctgaggattcagctggatccacatggtcttgagggttggcatgaggagggggaagcttttttgaatcgctttttgatcacataatctgccattttaagagtaagatttgctttatggaaatcaattcattaataaaaaatgatattcaagttgcaataccatttcacagtgaaatattttgagtacaattttgttgctagaatagtcatgggcaagagttttatgcaaaatgtttcaattatgttaataaataagacaatgctac

SEQ ID NO: 440 - DNA, 567 bp, Homo sapiens
gtgctcacattccctctgctggtctgtgctggtctcagaaggccaccgcgcccgcattccactcagccagggtccagctgcagcccccgccacccttccttcccttccctgtcctgggtcatgttgttgccaccctgtgtgacttttgaagctgtaaaatgagcttccagggcttgggtggcgtcggggcagggccgccgaggctgggaggaagcccttctgccttttgctggtgtttctggaatttgctttccctcacctctcacttccttctagaaggagcttcctgactggaaccagagaatgcatgtctgtccacttggtggctgctgggtggggccgggaacaaaggcccctgaccctgtgtgctggccgggacctgccaccagccccccagcctgcttcttccccttaagctttgtgcccctggatgcgctaacattcactcttgtttgtccctggactggccatgaagtgaggagatggttatttaaagagaattccctatttatttgacaaaaaatccagttaatatattaatgtgaaataaaccctttttgcacctag

SEQ ID NO: 441 - DNA, 956 bp, Homo sapiens
  misc_feature 644,833: n = a,c,g, or t
gtatttctaattttttaacagctttactgaggcataaatgagatgcaacaagccacacatatctaaaacttacaatttgatacattttagcatatgtatacacccatgaaactacttgccactccaatcaagataataaacttacaggcgtgagccgctgcgctggaccggtatttggttttctattcctgcattaattcgcttaggataatggccttcagctgtatccatgtttctgcaaaggacatgacttaattcttttttatagctatgtaaactgtcttcagcttgaaataactaatatgccaacatggcatattttggggtgccacgccctgctccctttcattggtgtccccaccagtttccctgcttcttccctgttgaccccttctctagtaagagaagatggaacataccagcattttgtgaggattttacgcgataaaacatgtaaagcatctattgagtggcaagtagcgagcacattgatcattgatgagactcccgtgagtgttgctggtgacagtacaacatcagagccactcccaccacctcgctcagccccttcagtgggtgtccttcctttccaggatgaaaactcacaaaaatcccattattttgctgatgacttttagatattnatgtcctgaagtcactttcagttaagttggccaggcctggtggctcatgcctgtaatcccagcgctttgggaggctgaggcaggtggatcacttgggtccgggagttcgagactagcctgggcaacatggcaaaccccatctctactgaaaatgcaaagattagccgggcatggtggtgcacgcctgtngtcccagctactagggaggctgaggtgggaaagcaatcacctgagcctggaggtcgaggttgcagtgaaccgaggtcctgccgctgcactccatcgagcctgggcaacacagagagactgtct

SEQ ID NO: 442 - DNA, 1804 bp, Homo sapiens
gtctcgctatgttgtcccagctgaacttgaacttctgggctcaactggtcctcctgccttggcctctcaaattgttgggattacagctatgaggagtcaccacactgagctcccagtcacttttaacaatgcactaagctctaaataatttgtcacttcatttttaaacctattttttctctctcattgcattggctaggatatctagtaccactggaatagtaattgttaatgatcacccctttcttctatttcattttaatgagaatgtttctaaattttcatgattaaagtaggtttgctgtaggtttctagtagataagtttatgaagataagttggtcctaatttactagaagatttgttaaacgtgaatgtatggtatactgtgtgtggtacgtacaaacttgagaccaaataccacatttattagaaaataattcataggcagcatgggcccctgggctgaagagcactggcctcagttggactgaactctgagaagatggaatctgccaattgaagccagacatctgtagaatctagaagtgaagaatttcccagagagaggtctctgggtataccatacaacctcaggcttaccaggaagtagcatcttgcttgcaagaagagaggaagaaagggctggcctggagggcgtccaggctcagcagatcatattcctactacagactgttgcctgcccacctgcctgcctgcctacctgccttaggttatgaagccaattaggaacagaagaggataaagaactgtgatttgttccactttcccctctccattaaactgtagaaccatgggtaaggaaattacttttttttttttttctgcctcagaagacaaagaacattcccttggagatgtcacttgtttttatggaagccactacctagagttgaatagctttcccctttccatgctatactgtcagcagtgccacatgacatcttcaactaccgctacctaaaaaaaactcttacttcctaccctagcctggaataaccagtggctgaagccaaatgcctaagaggtgctttcctcaaaagatctctgtctcccacacttctgggaaataggtggaaagcagaatgaaacaaagtgttccttagtccagttgtagtcaaatggaagaactgaatatttatagacctggatttcttatactagccccttccctcacttgctgtgtgagttgggccaaatcacctaaactctctgtgcctcagtgggagagaggacaaaaatactatctaccccaaaattcattgcaatgattgaagaagatttgtataaaatgcttagcaaagagtctagcaatttaagagttcacaaaatattatttgttaaaatgcaaatgaatgagattgtgagaatgctcagagagtgacagggaagaagagccccatcttattccatatctatctatctccagtgacatgcaagcagatactaagttatctaaatctaactaaagagaacaaagattccccacagataccttcagtagccccatgctttggattcaaccatctctttttatagggaagggcagacacatgaaactgggcattcattgcaaaagcaatgactccttcgagaccagcctggccaacatggtgaaaccctgtctctactaaaaatacaaaaattagctgggtgcagtgggggtcacctgtaagctacttgctaggctgaggcaggataattgcttgaaccctataggagaaggttacagtaagccgagattgcgccactgcactccagcctgggtgacagagactgtctcg

SEQ ID NO: 443 - DNA, 642 bp, Homo sapiens
  misc_feature 634: n = a,c,g, or t
cctgtttccatttgaaaggaactgtaagcttttatcttttaaccaactgaacaatacaccaaaagcagcctagggatgagcatttctttgaaagcaattaggttattcacctggtattaaaactatttactgttaaaaaatctgtgacttcatgaagttgatttttaaaggcagcatcaaaaactgaaaaggaagggaaaaaataggcagcttctctgcacttgtttggagctccccaaaacaggagccatggagaagtggcatcaagaccgggctgccctttcgagaacaccctgtggcagttcagagacacgcttttcctacactgcatgcagcccctctttccagcactggaaagaagtggtcttgagcccagctgagaagcacttcacactcctctctcttgttctgaatggtgtttgtgtcagtctgcagctgtgtatggtattatgtcttataatcctgcatcacttctatcctatccagtcatatctaatgtagaaaattagtttccagtgaaagtaatatgtagtgcttttatgatatttgtgtgcaatatcccctcttccattgaggatatttgatgtaaaggaaaaaaaaaaactcagttccacaataaaatacaaaagtggcnaaagtttc

SEQ ID NO: 444 - DNA, 2592 bp, Homo sapiens
atcccacccaattcctcgctgccaaggagagaactaaatcccatgtgccttcattactggatgctgacgtggaaggtcagagcagggactacactgtgccactgtgcagaatgaggagcaaaaccagccggccatctatatatgaactggagaaagaattcctgtcttaaactaagtgccttactgttgtttaagcatttttttaaggtgaacaaatgaacacaatgtatctacctttgaactgtttcatgctgctgtgttttcaaaagctgtggccatgttcctaaattagtaagatatatccagcttctcaaaaaatgtatatgattgctgttagccatgtctattgtttttcctctggattcttttcttataacttggaatacacaaaagtataaaacaagagatgtgcaccaatgaaaactatgctgggtcgaattaccttcagcacaatgttaatgttttcgttctcatttatgcctttgtccatttgcacacaacagaaattgtaatgagcttcactatttttgtttctttccttccttttttttcttttttcctttctttcctttttcttgtcttgtttcttgtttttttctcttgtagtttcttttcttaattgtcatttttgcaacaaaaagccaagaaagagctttagtttcttggcaagaataatgtgatattagtaagtaaaggttcttaaaagtctgatgactggaatagatataaagtcctgtttaaactacctaaccttggctgtgggccgataatgcatatgtccagttctcacttaaattatgcaatgatatttctctctgaggaaattatacggaatgtaacttataaaagctttactgaatataagttataagcattttattcattagaactccaaaatagatgttcaaagttcagtccttgccatttgactgagaccacatggtgtgccccttgagtgaggctaatctttaggtttttcctatagaaaacgttcttcctccatcagtagccctttatttgatattcagaagtggaaagctttttcattctccagtagaacttttaaaaattgttacagatacctagctcttcacagatatcatgtattgtaaacagtcatgtgtcttaattttattttctctatttgagtgcataattatcctaataatcccaaagacactgacaactcaaggaacagcagtacagtactattagaagttaagtatgttgttgttatttcacatttcatttaattgtggataaatgttagacatctgttgaaataagctcatatggtggaaacgacaactatattatgaattattttcagaaatggatctttgaatagcagatcaggatttaaataataaaattatctatgaatcacttttatggtcatacatatatgatacaaatccagagttattggtgcagaaatggctacccgagagcttggtaaatttgccttggtttcttatgttaaatgtattgtgcttcccttctgtctctagaatgtggctcttcagaagacagacaattgacatttaaatttttccaaacaatgaaaaactaaattaaaaacattgcttgatatttcatttaaaattgcaccttgcttaaggtttactgaataactgaaatgtcagcaatttaaaataaattcaattgtgtgataatatctcacctataatagaagaaaaggaaaatcatattatttggcaattttgcagcattgtggttgcctaacaggtatatccagcagatgagaaacagtatgaaaggattgtattaacatggtaagttttgccctaaggaaaacgatcttgcattctggattcttgcagcaaagtctcaggtacttaatacgttttcttggtttatcatctgttctatgattcggcttcactttgggtggttattgaattatgtaacagagatttggttttcccaaaatgttatcacatttgaaactatgattgctttttgttcagtccttttggaacacgtagcttccagcttaagggtagaggaaatatatacctaaaatcatcaatacatgaaagaaaaaggatggaaactatgtcctcagttttacttctaccaaaacatccctgtatgtgtgtgcatgtatgttggcgtgtgtgtgtgtgcatgcatattagtaaatgtgtgtttgcatgtgtgtgttggggagtgtatgtgatctgggtgtttgtttatctctgttattattcccctttagctttattttagtcaactctacattatgatgaatttcaaaatgaagctgtattaaaataattgtaatataacaattcaatctcacatgttactgcagatagttaacttttgctgcaatctattgtacatttgcaattttctgtgttagtaaacttagcagaatctggttatttatttttgtgtaggcttaatgttcactgaaagataagtcaattactgttagtaaaaaattaaggtactctcactgcagagatttaaggcctgggcctaatgtgctgtattatgaagccttgtgactgaaaaatatgtttacatacgttgtctatttttttaataaacttttatagctgg

SEQ ID NO: 445 - DNA, 2092 bp, Homo sapiens
ctctgtccgtgaaagaaaaaaaaaaaaagaaaagctgaagtgattgaactctagaatcttaacctgtgtatacctaaagggagccatattgatgtgatgtttaaaaaaatagaattttaaaaatgtcattaggattctttatgcttgggtttatattctcatatttcaagatggggaaaaattattcagaccttaaagtacaatacagacttctgacgtgtctggactgtcaccctgaaatccattcttcacagggaagcacagtcgtcttccatggggcaactttgggcatattctcaccttcaatttctcctatatacacacatactaaaaattaaaacctttaatgctatatccaagaccctctcaacctgactccagcccatttttcccacttttacctttcactgcatacctgtaccctacctccttggaaatgcattgctctaattatttccctggagatgcactatacttgctgcttttctatgtagtttattctgttccctccatctacctttcttcccaccaccaccacctattcatctttatttgtattggttaaattctacctcagttatctaaaataatcacctactatttcctctctgaagccttcagtatcttcagtaccccctttctcccactgcttcccctactacatagatgtacatatcagcgtcccctacacaaaatgtattgcttgaaagcaaggaccatgtaacacatctttgtatcccttacaaacttcaaataggagccactctgaaggtatctgttgaattgagagggttttttggagagtggggagaaagacatttatacacatgattaaatcattttgttctcttcttcagaataattatgttgggtcaataacacttctgattttatgaaattttttaccatattaaatgcttaattatgtttttaaatgatcatgtgtgtttaaaacatgtcataattttaaggatcatcttcatctgtttaatagctattccataaaattgagaatttgatagttttaaataatatataattgactaacagttaataaatatgtgattttaaagcatgtatggaaattatatcactatttggccttcattgatgccatatacatgaacattttacccactcaagtgttttattatttctgaattttgaggaatacattattttcttctctccccatactttacccccaacaggctgctgtgattgtcacagcagcaggagccattgaaggtttgatcccagccgatgaagatgcttaaagatgtctgtttgctgaaaatatctggtaacaaacaggaatatatctcaactacagaacacctacactctgaaagcctttactgttggatctaaatgtgttgtgtggtcaagtctaagaaacacatggtctaaatgtgagattttagaaacagctgaagaaggaacaagggttttgaacctttcaaatggtatggaggagatagtgaaccctgagaatgtctggaatggcatacccaaattggataagagtccacctgagaaaaggggtttggaggtgatggagatttaaccgtggatctatagctgtggccaatcagtcagaagctgcccttgaacaagtggcatcttacgcagaccaacagagtatttgagaaaattgaaaacatgtaaccacaagaagttgtcattttcaaaaacttctatataggtggaaaacaaattaggtctcaggttgatggtggggtgtgtttatagtgatcctgttatatatacagatctgggatctttcgtctttattgtctaacgtttctaattagttgggaggatttattttgctaaacagtttactaacacattacatttcaaaaactattttggtacctttcaaatacagtgtttaaattaaaatagaaaaataagggctcatgacaagtacattatttgattctacttaggatagctttttagcaggatctccttcagaatttttgtcttgactttgaatctttgcctgtttgtctaaacatttgactaacattctgtttgaatttggaagtattctaatacaagatttgaataaagtttatccttaaat

SEQ ID NO: 446 - DNA, 1266 bp, Homo sapiens
  misc_feature 503: n = a,c,g, or t
agaaaaataaatgtagattcgcattcctataatgaataatttaaatgtgaaggaagtaagataacaagaaaagaaagacatttaaaggtaaaattacagcatatgaggaaagggtatggaatgggagaaacagaaacatgggagaaagaggtaagggagacctaggggaagaaagacaaaggaaaagagtttaaagtttggaggtaactttgccagaggtcacattctgctagtcataagcaatttttttcaaagtttttgccttttttttttgttgttgttgttctctggctaccttaattcttaagcttttagaggctcctttctgaatagacccaagcacacattgaaatttctttttgtgctgttgtcacaaagacctgaccatcactgctttgcactgtgggatcttgggcaagtgacttaacctttcagaacctcagttatctcctctgtaaaacagataagggcacctctctcaaaccatggtggtgaggattaanggagataatggttaagcacggaaaacattgcctgccacaatgagtgtcacgtctttgtcattgttcttcttcccagtattattatcatgctctgggtcagatgaaatctagataagagcttggcttttcctaccagaggctagttttcggggccataagaaaagtctagaagacctgatagactggaatggaagtttcttgggaggtgaggccagcaaggcacttcatatcttgcactcttaaaattaacccagtttctctcttgcccacatccccctacccgccactctgttttttttttccccctgggaatttatttccaactgtaggcacccaagtggatgagggggttcgctcagccagcaagcgcatcgtggcgcccccaggcggccgttctaatatcacatctcctgagttaagcaagccttcctcaaagagaggggcagaagcaagaagagattgttttgaagccaaaatggtacaccgatatttaagaaggaaagcgaatccaaacggttgtgatctaaagaatcaataagcctcaagccttatgtttctccaatgttacgctcgcttgcctagctttacgaatattgctttgttttctgtttatgcatagccttgatttgtttgactcccctccccccatttacatgcatgcaatcagacaggccactaaggtaaaagagtctgctctatcatagtgttgagagcgtgtgtagtgctgcatcttatgacaaggggacagacaagctgggacgtc

SEQ ID NO: 447 - DNA, 1446 bp, Homo sapiens
cacttatagcagcactcaactagacaaagtgccacagcacacagttccttaaacctatactcttctcacaacataaatgctttcagtccaaaataaaaaccaccaatcactatcctaaaacatggcacactctgctggtcctttaaactttacagaggctggagaaggcagctcatgtctgagtaagtctgcatttggaaaacaacatgcacacatgcgttaatgcaatgtttatggagcatgctctgtgtgctcagaagcacgctacggagctgggaagatgacatgaatttatccttataataccctgggaggtgggtactaactgtcccataattccctggatttatatgaaaagcccagcatttacatttcttcttgttctcactgattttttttaatttttttatttttctttaatgcttggaacaggccaggctcggtggctcatgcctataattccagcactttggagggccaaggcaggcggatcatctgaggtcaggagttcacgcaaatcagggggcccgtgaaaggcaactgagcagggatccatgggaaagacaccctcagaggcacaagattctctcgttacctttcagtgggctgatacttcagttaaagtctcctgggaaacgtctgcattaggttcttcctcggtagttcttcttaccgtgcctgtaaaacaaaacctatctagtgtctgcataggtttccacttcttgtccccacctgaggaatggaaagcaacggcacagtccttgctcatgttttggagtgaaaggagcttgaaggtcatgtgagctttgccaaggcttctcctggcctcatgtcagatacagctcctaactcccaagcagcctaccatagtgtcctcctttttttgcgtgtgtgatggggtttcgcacttgttgcccaggctggagtgcaatggtacaatctcggctcactgcaactccgcctcccaggttcaagtgattcttctgcctcagcctctcaagtaactgggattacaggcatgcgccactaagggaggagaccactcctcatattgtcttatgcccaatttctgcttccaaagaaagaagaagttaaaactaaaaggcagaaatgaaatccacaggcagacagcccagcgccacaccatgggcctggtagttaaagatcgagccctgacctaatcggttatgttatctacagattacagacattgtatagaaaagcactttgaaaatccctgtcctgttctgttccattctaattactggtgcatgcagccttcagtcacttactccctgcttgctcaatcgatcacgaccctctcatgcaaacccccttagagttgtaagcccttaagagggataggaattgctcactcagggagctcagtttttgagacgtgagtcttgccaatgctcccggccgaataaagcccttccttctttt

SEQ ID NO: 448 - DNA, 697 bp, Homo sapiens
aaacaccgagggaaacttaagaacgtttaaaatataggagtccgtgatttccctgtgttttcagtttctttccttctgtgaacgatgagacttggagaacgggctggtccttcaccacttcctgttggccctggcctggccggggaaggtggcagcggcaccggactgacctgcagtgacccgcgatgccgcgccacgagggacacttatggcttcattcgagagctgctgccaaaacgcctggcgccgccaccgtcgggggctggcttcgaggacgcccgcctgcctcgcgggtcgtgtccgcgggactgtgttcgtacgtgcatagtttcgatatcacatcgcggggctgtgttcgtagctgcgtcgtttcgatatcacaccctctgtgtgccgccttacttcctgcttcgagaatgtataacgtggaaatccacgggaccaaatttctgcagaggccttgccggatggttccataactgtagagtctaattgctatccattacagaaattaatcgttcagttgaaagaagtactgatgacttttcaaaacaaatgaaccaccgtagctgacagagaaccgtatcgtagaggtttgtagttagtgcttatttttgcatgttgatgttgactagctaataaactgtaaatgtaaaccatgcgaataaaatggttttctatttctcatttccgtgtg

SEQ ID NO: 449 - DNA, 1354 bp, Homo sapiens
cgggactgaagatggctgaaattccagcaagcagacagtggttctctgaagaggctcccctccgcccacacccatgagtgtctgctccccagatgctccaatcctacttctccagctttaccttctgttccataagctgcttcattttctttctccaaatccctcttttgctggttggacaaagattgtttctgttgcctgcaatcaaataacccaaaaggatgaacaggtgaaatcataaacatacttttaagtgcctggaatatgcctgcttctgtccatctttcaacccacttgcatcagaagcccccttggaggatgagagcctgtcctgtgaaccatggtggttcagagtggaacacagcagagtgtggaacaccaggaatttagagcaatcagtgaaatatgatgtatgcctctatgtcagaaaaattactaataagcagttgattattagtaatcaataatagccttcccattttatatcgagcacagcagtcagcatgttaaaaacaaggactgctggacaccagctgcgatgaaatgctttatcagaggacggcccttgatgtctatgtccatttgcaagtgtggcattaattacaaggctggtttaagtataatcagtaagtttatatgctggatgctcaagatgatttctggctaaacatggaatttctatttctattttccttatgttaaaagccggaacagcaaaatgtattcctaatgtcactattatgacatttacatcccgaaaagttgcagtaactgatcaatacaatagtggaatgcctggaaacctgttccttttttgctaaaaaaaggagggcactttttatgtctttgatgtgaagttcatgttctttgacagtgattgatggaatatgctacagaaaaggctgattacattttactagagaagtaaaaaagaaatgcaggagaatcccacagctctggaattgaatggaaagcaaaggaggagctcctctagggggctatgggatgcctctgtgtagctatcgaatctctggggccatggatgagaatttgcttggtcagtaggtcagcattcaagagtatgggctggatgcagagtaaacgacctgctgagagtaatggccactgctttacttctgtcttcaaaatcctgaacaagctcctcttttggccaactctaacctggaaccatgcagattaggaagagaaagagaagtggattgtgagaaagattttagcttggtcaagttgataacggaatgattcagaagaatgcaacccttatcaactaggtatatctcttttttcctacatttattgtccaaataaagcaaaatcatgctttcacctgcct

SEQ ID NO: 450 - DNA, 1044 bp, Homo sapiens
gccgagattgcgccactgcactgcagcatggataatggagagagactctgtctcaaaaaaaaaggtaatcggaacaagaaatttgtcagctaccatatcaaaacatctagcaggccaggtgtggtggcttgtgcctgtaaacctagcactttgggaagccaaggtgggaggactgcttgagcacaggagttcaagaccagtctaagcaacatagccagactccatctcaaacaacaagaaaaaaacctgtagaatttattgtttcaagatgtggtagtgggtaagaccaatgactttggaatcagtcaaaccaggctttgagtcctgctttctgaattattagctttatattgtgctggctacttaacttctttgaggctcagtttccttatctgcaaggaatgggcccttatcttgggcccattcttttgtccatcattttgtatttacaaactcgtgtgtcacatatttgttctcgatgctggagccatatcatatagtgaaaaatgctataaagaaaaaacataaaaacagagtgatgtcacgagaatacccagtgggtaatcttgggagatgatgatgcttgggctgggagctgagcaaggagtacccagctatgcaaagactggggacatacatttcagatggaggggacaagcagtgcaaatgccttaaggggtggcaagttaaggaacagaaagagcatgagtgtcactagagtaatgaataaagaaaaagatggaagaaaaggatcagggattttgtggccttgcacagagattttgggttttaagactgctggagagccagtggcaagggagtaaagacttcatttatggttttgcttacttgtctggctgctgtgtgaaatatgcattgttaagaaattaagagtgaagcctggtacagtggctcacgcctataatcccagcactttggaaggctgaggcaggtggatcacctgaggtcagaagttcgagaccagcctggccaatgtggtgagaccccatctctactaaaaattcccgattgaattctagactt

SEQ ID NO: 451 - DNA, 1133 bp, Homo sapiens
caaagacggaatcacactggctattctacctctaattcccttctgataactttcctgccctttactaccaccagccacgaaggtacccagtgtctctgtgttccaccctcaactgctctggacagcccaccttggcagcccaacaggtctgccttcctgaccaagctctgtctcaggtgttctccactcagtttcatgttagatctaccagcaaagcttgtggaaaataccaaggactggcccctccctcatcagttaagtcagaaactttataaattcttcaactgatgcttttgctaaaatctaggctctgggcatttctttttttctgccctttgtccgtcaaaacttatttgtctctgtctcattcttttaaaccctattcctccagggcaaaatgcatgtgttaagttgctatggtagatgaataaaattgtctatccctactaagcacaaaataaatgcaaattaaaacaataaagtagaccttctcacttatcacattgatgatattttcaaacatttaattcctggtgttcacgagaatataaaacatatactcctattaccattgagtgaccataaactgatagaatatatctaaaaaaagtgatttcgtcatctatgttaagacataaaagagctcaaaccccataacctagaaatttcatttaattcattaaaaggaaagagaagatatatagaaaattaattatgggaacattcaatattgcgttatttataatatcaaaaatgattttttaatgaaacatttaataatgggatggttaaaggtgtaacagtgtatccactctatggaataatatcaaaagttacatttacaaatgtaagagaacatgggtatatgctttcagtacattcaatactagtgggaaaaacaaaacacaaagttgggcatatagtaagtatatatgtatacatacatatagatgtatacatttaaagaaagatgtgaaatactgaatgtttatctcttggtggtgggattaaaggtaacgtttattcttttctcctttagatatctttattttgtaagtgttgtgacaaactgtgttacttttataatcaggaaaaacccatgtatattttattaaaaattactgtagaaatgg

SEQ ID NO: 452 - DNA, 1393 bp, Homo sapiens
agcagataatagcacttttattagcagtactcagcaggaaaagaaaaagcagttcctggttgttatttctgttttctctgtttcttagggcgtccacttttcttctgtcctttcttcttcgttttaaggagaacagctttttctccaataaataagcttttaggatgtccttctgcagttttggaagtaaaattaagtccctgcttaggtttactgacattcttcaatcgtggatttgaattttgttgtttaaatttttctttattaacagaacgcatgactctgagttttctccccatgagttcagaattatttaatttcagagcaagatgaacagaatctgtattctcaaagagcacatagccaaaccctttgccgatgcctgtcattttgtctctcacaatcctcacggccatgatacttccacagtccagaaagtgcttctcaatggcagattcttcaactttataagggagattccccacaaaaaccgatctcttgtctctagatgaggtctcagatgcgagatcaactctaatacgaaatccatctgcaatctgggccccatttcttttcaatgcttgcgtggcagcactctcctccttaaacacaacataggcattaatatttttctgatcaggatgaattttacgttttattgctgccaactttttggatagcgttccctctgctggaatcagagaacgaaatcgtacagattctatttgtccatactctttaaaaaacgacttcagcttcttcttattacatgtaacaggcaaattcccaacaaacacagttctctcattctttaatctctcttcttcttggttgatttgaattttctttctttgactgacaactgtgtcttctgtgtcatcaagtatttttctatctgctactttaacaccaggttgagaatttttccttttctgcccttgtttctggtgaatatcttcttataaatcagaactcgctagagagctttccctgtctgccaactttttttctacgttagtgtgtttcttcttcgctttcactttttttgacaggttcttgcgaaagtggtctttcaatctgggatgtactttcttcctcctcattccgtttcgtttttttgatggtttgtttaggcacaggcacgtacacgggttgaatctggggctccagagaactgaagagggacgccagccgaccggtgccacctctggaatggtgttcgccgcgaaataagctactggcgacctgtccaagcctgtagtcttccggcggactcccgcgaacgccgtcgtcaggattctctccctcctggacacttctctttctcttccgtttgctcatcccttccaaggccattcttactccaaagactccccgattgaattctagacct

SEQ ID NO: 453 - DNA, 925 bp, Homo sapiens
catgcactttgcaagtgcattttgcttgaatattttgcaaagatattctattgaattgagaggcagcaagtatttgatgtaatgattacacttgatcacacaaaaacacttcacagtgccatggctggtcttcatagtagtcagctcttgactttgcttctgtttttttttttttctccccacaagactgttagcttttgctgtggcttcaggagcatttacatgtcttaaaagcttataaataatataaaaggctgactgtgttagtagtgcagtagtcagtgcataatgccaaattggtagtgatgtctgcacgacatgctgacttgaataagttattttcaagttgtctcattaaggtttgaactggggatgggacagagatagcctttatcacatatttctttttaatttttatcttactttttttttttttaggctaaaggcaaaaagaatgcacatacttattttaatgtgattagaagatgagttgttccctggtaagcttgacccaccagtatgtgacagttttgcagcaaccttagaagctgggtttttctcatcccacagaaacccccccacaaaaatacattgttattctgtaagaaaatatgactaaattatcatgtactgagaaaggcattaggttaacaaattaggaaaactatgtcttagatgtacaaccaactttacttcccgttctctggtgggcaggcctatacaaacctactcgcaatgtccgaggaagctgagaggctaaagaaagaggctcacaattccagtttctcataaagaaacatttaggttaaggtgaggtggcccaggttggtaatcccagcactttgggaggccaaggcgtggaggatcacttgaggccaggagtttgagaccagcttgggcaacatagcaagacctcatctctatt

SEQ ID NO: 454 - DNA, 553 bp, Homo sapiens
ttttttttttttttaagcaattactgccacaacattgccatttacacttccccatgccctcattttttttttaaaccatgaagtactaaagataaatgagcctgaggcattcttttatcttttaatcctagagattgttaagcttcctgtactgtaggaactacccacctaagctggcatcatacagaatataattttgcaacatatagttaagattctgacaatgtagtttttctctttaggttaactggaatgccttttaccggaggtccagagaaaaactctactgagaataaaagccctaaacagactgtgagctctcattcaagtttcttaacaatattgatttatctcaagagtctgcaccgtgacaatttctttatcctctccaaactcaaaactctcaccaattattactattttagggccaaagttaaggcaaagaacccaagaaagataattacggggaaacaaaaacaatggcaagttaaaaatgatttacaaatatttaaaacttctttaaaaaccacctaaactttcataagcaaagagg

SEQ ID NO: 455 - DNA, 1233 bp, Homo sapiens
tttgatagcatgaaaggccttctgggatgttctgaaactaagactgcaagttttgtcccatgattgaagaagagaaaatatctgattgttggcctcatagaaattttgtgtagctaaagtatttgcatgctaaatctttcaaatggagaaattgaggttaagcaaaaataggtgatgggatataatataaatacctttccagatttagcaagcttgctatagtgaagctatcttcacaaaaaatgacacccccccctcaacccccagaatggcttctgtgttgggatcagttagcatgcttgttttggatgtccccagtatggtaagaatgtcataggaaatcctgctatgtgtctatgatgagcagcaggcgagtgcacactgttctatcagggccatcaatcatggactcacgtttcagcgtctgtcatcaatcactcatagacttcataccttaatattcccttcattcctttttgttccttctcaacctacctacctattcatgtgtgaaagaacacttttttccctaaccactaacaggttcaacaggttatttcacctcctagcttcctctttatccctcccacatcctctttgtgctctaagagcaggggaacacactatcagataattatagtctctccttttcaatataaaaactttatgttgctgtttctcaaagcatatcaaagtaaagccatggggtgaatggtacacttaatatagattattttactgagctttaaaaaaattaaaattacccccataccagtaagtgagaggtacaggcagaatggctaaaggcagaggtatttctcaaatctgttcaaattagtctggaagagcatgggctagagacaaaatcagtagatttacattgctagacagtatgacatatcatacatttagatcattttaaataaagtcattactgaatagatcctcctaaaacaaatactattaccacaaaaagtttcttatttaagagacatcagggaccctcatgctcagcctctgttcagtgccgttttaacacagccatgtccacatccatgtgaccattgcagatctgtttgggtggcttagctcttaccaaagacaaccaacagggtctgggccagatggtggaaattttatccctagatttgtttaatgagagaaacaagaagtatgagcaattttctgtaaaacagaaagccagagtaagaggagcagatgatgtcaataagg

SEQ ID NO: 456 - DNA, 1393 bp, Homo sapiens
ggaaatttaaaggtgttggtcgaagttacaggattgccaaatctgcagcagcaagaagagccctccgaagcctcaaagctaatcaacctcaggttcccaatagctgaaaccgctttttaaaattcaaaacaagaaacaaaacaaaaaaaattaaggggaaaattatttaaatcggaaaggaagacttaaagttgatagtgagtggaatgaattgaaggcagaatttaaagtttggttgataacaggatagataacagaataaaacatttaacatatgtataaaattttggaactaattgtagttttagttttttgcgcaaacacaatcttatcttctttcctcacttctgctttgtttaaatcacaagagtgctttaatgatgacatttagcaagtgctcaaaataattgacaggttttgttttttttttctgagtttatgtcagctttgcttagtgttagaaggccatggagcttaaacctccagcagtccctaaggatgatgtagattcttctccatcctctccgtgtgtgcagtagtgccagtcctgcagtagttgataagctgaatagaaagataaggttttcgagaggagaagtgcgccaatgttgtcttttctttccacgttatactgtgtaaggtgatgttcccggtcgctgttgcacctgatagtaagggacagatttttaatgaacattggctggcatgttggtgaatcacattttagttttctgatgccacatagtcttgcataaaaaagggttcttgccttaaaagtgaaaccttcatggatagtctttaatctctgatctttttgggacaaactgttttacattcctttcattttattatgcattagacgttgagacagcgtgatacttacaactcactagtaatagttggaactgaagacaggatcatactaaaatttctgtcatatgtatactgaagacattttaaaaaccagaatatgtagtctacggatattttttatcataaaaatgatctttggctaaacaccccattttactaaagtcctcctgccaggtagttcccactgatggaaatgtttatggcaaataattttgccttctaggctgttgctctaacaaaataaaccttagacatatcacacctaaaatatgctgcagattttataattgattggttacttatttaagaagcaaaacacagcacctttacccttagtctcctcacataaatttcttactatacttttcataatgttgcatgcatatttcacctaccaaagctgtgctgttaatgccgtgaaagtttaacgtttgcgataaactgccgtaattttgatacatctgtgatttaggtcattaatttagataaactagctcattatttccatctttggaaaagg

SEQ ID NO: 457 - DNA, 471 bp, Homo sapiens
agagaaagcaaatgggatggatagattttttttttcttttcaaggggggcaggaaggtaatggtttgagtagcctttgtttaaaaaaaaaactaaatatatttaaaaggccacatttatatttttttcacaagaaccacataataaattccacttcttgacctgaatttggaaatccgaaattactaatccaggccaggtgtggtggctcatgcctgtaatcccagcactttgagaggccgaggtgggcagatcacttgaggcctggagttcaagaccaccttggcgaacacggtgaaaccccgtctctacaaaaaatacaaaaattagccaggcgtggtggcacgtgcctgtagtcccagctacttgggaggctaagtcagaaaaattgcttgaacttggaagatggaggttgcagtgagccaagattgcaccactgcattccaacctgggtgatgaagtgaaactctcc

SEQ ID NO: 458 - DNA, 1429 bp, Homo sapiens
gataatttatattcagataatttgttatggctctttaatatcccacaaggggctttaaaaagcaaacattcaagagtatgtagtttttagacattaagttaattattttaaacagtgacagcaaaacacaagtgattaaatatagtttatttgttccaatgactaaattttacctcatttattaatctggtcattaaggaatatatttaataatattatgtaattattctttttatgcatgatacacctagaaaaatgccttttgtttctattgatggctttgttgtttggagctacttttgattacttattgcagtttcccaatttagtctttactttatctaactcacaaagtaaaattaactgatcacatggcaactactgtatttaaatagttctggaaaaatgaaagtgctttttgctgcttggtaaatgggtaatgcccttgattccttgactgtaggacatagctgatctaaagtactctgtcagttttaccttcacccatgactgtcattagttgtcaaagttgaaaagtactttagctgtgagaaatccttgtatgtttttattataagaggtataatcatcctcaaagcctgtttttattacatgatgtggactgattattttttctatcacagtgttaacagatggattttattgtaaatacaaagaaaacatattgattattgtagtattcttatgtcacctggccttttgcgtgagattatttattatttctagcaaggctttcttcctttcttattgcccagagactgactgatacatcttttgttatttttacacataaattaaacatagcctttttggacaaattcactaaatattaatgtataaaatgtaattgagtaaatttttatcagaattttaaaaataaaagagcttagactcagtagaactcagtagaagcttcactatttactccagcgtgtgtaaattgtacttactctattctcagagtatatttactgtccttaccattgattctttccctttgctaatttttttttttgttaatggtggctgcgactttaggtggggtatattttcttctcctaagagaatagacagtttttccagattcatcatcattgactgtcaagaaagacccttcagcaaggctgtaccctcaatgccgttgatggcctgtcttcacggatttacagacttggcctgatgcccatgtaaattcaagctttggcttgtggtaacaaccacaagaagacaagcatctgtggtgcggaggcaggcaggctaactaggtgttgacaagctaagaaagtgaaactgttctttcttagttaactgtctttctctggagctctgttattttgagtataatatttccacgacacttagtaaatgcaagctaaaatgtaataattataaattgtattggagaaac

SEQ ID NO: 459 - DNA, 1743 bp, Homo sapiens
ctgggaaagcctctctgccagctgaagctgccgcagcagagctcatgagaagccctttcctaaggtggctccaggagccctaaccgggctgctgggcagtgcagcattttacttttttgctttttgtttaaaaaagggagatgagtaagcccccgaggacccagcggctgcaacttaaccagcctccagttcaccccagccccagccaggaagagaagcccctctcctgtgcagacaggcaggactactgggtgggcgtgggtgagcaggagctagagggggatccaggcacagcccaggggctgtttgccagatgacccctgaaggccatcatccccagaacatgtgacctcgggacgcccaggtgtgtctgcatgtgtgagcatgtacatgagtgggtgtgtctaggtgcgtgcgcgtgtgcgtctgacagtcctaccagagcagacgctgcccagctcggcgtgggctgggctggcctgcctggccccgagagcccagccctaggttctgacacctgcgaagtgggaaggaccttaaccacccacctgccccaggtgctcacccagttcccgcccttcacagaccccttgtccacgccaggagcctatgtggactgacaggtaggtggacagacggacggatggacagacagcctgggcatggttccttcttcggtccactcctttctcctgggatccagggttggggtctgagctccctgtggtggtcattaagcccctcacacggcacctgccgaggtttgcagcaatgactttaatacttctggaatgattagggaatctgagaacagaccgtgggctgctatgctgaccaggctccggatgtggaagctgggccctgcctccttgcaggggactctgcccagctggaaggggcaggcagctcggcaggccctgaccggcaagcgggcagtgccaggcagcccagcagcagctggagcttccagaatggcacagcagtgggcctgtggagaggctggcgtcaactgaaggagaactggagggctgacacgcgtggctggcgggcaggcaggccaaggagcagagggcacgggcctacgagagggcggggcggcccagccgccggcagtggggcccgaagccactgtcgccgccggtgccactctgcaggctgtagtggtcatccgcgtcactgctgctgccaacactgtccagctcaccagggccaaactccatgccctctatgtccacttcttgctctgagtcgtccgtggagacagcagagcccgtgctatctgtgcgcacgcgctccacgctctgcaccgacagctgctccaggcgccgcttcaggaaacgatgctcctgctgcagctgctccttgatgctcagtgcccggcggtcctgctcctccagtttcttgatgtgcaccttggcccgcttcaggaggctcagcgtggtgtggcgggtgctgtcggggcccaggggcaccagttgcttgagctgctcaaggtacagcctgagtttggctcgtctgtgcttttctagctcgttgtgtgaagacctgttgttcggggccttgcgcaccaggccggccgcctttgttttctccctggcgaagtcgccgtcgaagggcagcaccgaggcgtagccgtgctcggcctctcgatccctgcgctccaggtactcggccgcctccagcaggatcagcagggagttcagctccatcctcccgcccgcgcccgtccgccccgggacggcg

SEQ ID NO: 460 - DNA, 2135 bp, Homo sapiens
  misc_feature: n = a,c,g, or t
atcaaagtaaatattcaagagttatatttagatctgtaaagggaagcccaagtgctttgtatgaggtgcgaactagggttaataggatgtatttaacaccatattgtttcagctcaagttagggagagaaggagatcatgtatgcaaaaagtagaacatttctccccttcctattttgtctagaggggcgtaccctcttttaaggtattgtcacatgcacaacatctggccttcagttctcctctccgctgtcatgcaatctggcagaatctctttctgctccatggttcctaaatgcatccatcccattgccattaggattctacttttggcattttccccatctgttttggtaattactgtcagatgaactgatatctctaagttgaaaatggccaccttttaaggtagcacattgtagtcaacttcccaaatcatgaagtctatgtggcttttagtagttgtttgcagaagtaatttagtaacttttctttttcttttttttttaatttctaagccactgcaagcacgcaccagccttcagtggcctgaattattcagcagtcattaaaaatgcagtcagtgataagaaagacagtccttgtgcctgggtttgtcaacatgtcttgtcctcagcaaagactaggttcactggaagcacgcaggatttagttcaccttctctagaatggctgttgttgggaggatttctagcaacattactataaatgatctgcctgcctctgtgctgtggtttataaactctgtgtaactaggataagctggctttggaagaggcaagccgttctttcactagaagggagaggttattgcatcacccatcagcaagagaggaattcaggagaggtagagagcggtgtggggtttgggtggcagccagctactttccaaaacttcccaggggctgcaatacagccgccaacccaaatgtcattgggataggccagcgtgccagatgccatcacagaaaataacttcccttgcctggcatctgggttcttgccttgtaatccagaagaccacatgctggatcagctggtcccagcggggaccatgagctcttccgtcctctctccctccctgtctgctgagcatttgaatgagtcatcagagtgcagaatggattttggccatgcccttaattgagtgttctgtacatacaataataattaataataatttgaactgatccttctatagttttgtctctggaccaggcactgctctaaaggctgcacagattgtaactcatttacatatgtaacacatatctacatatctcattagcctgaagcacaatagaatgagaaaagtgaaaagcaaagtgcttagactctagatttggaccaactggcttcatatgtcaactctgcctcttttcagtataggtgactttagaaagtaaattctgctttctcaagccaagcgtccatgcacagacaagggaataaaccaaacgtggtgtatactggaatattattcagccttagaaatgaaggaggttctggccggctgtgtggtggctctagcctgcaatcccaacactttgggagggtgaggcggacagatcacttgaggtcaggggtttgagaccagcatggccaacgtggtgaaaactcaactactcaaaatggaaaaattagctggacatggtggcacacacctgtgaagccagctacccaggaggctgaggcatgagaattgcttgaaccctggagatggaggttacagtgagcccccgtcccgtccctgcacgcaagcctaggcaagaaagcaagaccctgtcccaaaaaaagaaaagagatgctgatacatgctacaacatagatgaaccttgaggacattattctaagtgaaatgagcttgtcacaaaagaacaaatattgcatgattccagttatatgaggtgcccatagttgtcaaattcacaaagacaaaaagtggcatggtcgttaccaagggctgggagaaaagaggaatgggtgagttagtgttttaaattggtacagagtttcagttttgcaagatgaaaaaagttctggagatgaatgttgggaatggctgtgcaacactgtgaatgtacttaacactactcaactgcagacttaaaatggt

SEQ ID NO: 461 - DNA, 1226 bp, Homo sapiens
  misc_feature 449,1034,1035,1044: n = a,c,g, or t
cagcactttgggaggccaaggcgggcagatgacttgaggtcaggagttcgagaccagcctggccaacacggcaaaaccccatctctactaaaaatacaaaaaattaaccgggcatggtggcgggcacctgtaatcccagctacttgggaggctgaggcagcagagccgcttaaacccaggaggcagagactgcaatgagctgagatcgtgccattgcactccagcttgggcaacaagagtgaaacttcatctcaaaaaaacagaaacaaacaaaaaggcagctgggttgtcactgttgggcagcatttgagcctgccacactggcctggaagtttcccttacagtctggaatttggtctgctccttccttccccttcaccccgttttcttttcatcaccatttttttttctctgtgtggtcctgtctctcccacgcactattttggggnctgtggggtctctcttaccagcctcctcagcaacgcacgtccatcaggcctggcctcagtggccagccacattgatgtcacactggaattgttaccccagacagggcgaagagataggctatctccccacctcccaccctactccccactatattcccgttttgaccacctcagcccctcagctgccccctctcactttggccaatcccaggcaccaatcagacttcctcctccacctggagcccctagcatttccttgtcccctcttccccaaaacctctgtaaagggtacgagagggaccccctgccgagccgcccgccactcagggcagtccgatctaagaagcagaactggttggaagctggctgggcctctgtccagtccccagatggataaactgccttttctcacatcccctcttggtgcctgatcttctctgcccccggggccagacccactgtgctggtttctgtcagtctctggcacagcaccaagctctgccaacaccaagtccctgacaaggctagaaggacaacctggtcagcagggctgcagtcccccatggccgtgtttcttggttcaanngaagtaagnggagtcaatgcacagagacagaccagtctggaataggagctggatactggcctcttgtcccaaccccaggagccccctcccatcctctccccaccctccctatcggggtacttcactgtttcttttctacttgtgtaaactcgagaaagggaagatggttaaaaaaagggatttgtgctgct

SEQ ID NO: 462 - DNA, 970 bp, Homo sapiens
atggagatggaggcagagcactaccccaacggtgtgctaggaagcatgtccacacgcattgttaatggtgcctacaagcatgaggacctgcagacggatgagtccagcatggatgacaggcatcctcggcggcagctctgcgggggcaaccaggctgccacagaaaggatcattctgtttggccgcgagttgcaggcattgagtgagcagttgggccgggagtacggcaagaatttggcccacacagagatgctgcaggatgccttcagcctgctggcatactcagacccctggagctgcccagttggccagcagcttgaccccatccagagggaacctgtgtgtgctgccctcaacagcgccattttagagtcccagaacctgccaaagcagccccctctgatgctcgccctgggccaggcatctgagtgtctccggctcatggcccgagcaggcctgggttcttgctcctttgccagagttgatgactacttgcactagctgactgtgctggctggctctggctggccctccactggccccagggctggagctgccctgccctccataggcaactggtgcagggactgggaaaccatagacagagtccactcctcctgcctggcctttccccctctccctttccttccttccttcctttctctgcccaccaccccgctcagtctctctctctctccccttcacgtgcagcggcctgtaacacagtattggctggttactctcatgtagcgccttctattttgaaaggggggttttgttttgaggaggggttggggtttttaaatttttttctcctgactgagccaccagtatttatctctggagagtttgtgctgagctggtttctgctaatttagtgatgaagcctatccaagttggtgatagcttattattttcataagtaaaaaacaaatgagattatatatatatatataaaaatatatatatt

SEQ ID NO: 463 - DNA, 563 bp, Homo sapiens
ccgcattgagctgtctgaggaaggagctgagggccgagtggtgggacgcaaggacattacctccattctgagagccccagcgtacccccttgagcttcagggacagccagatccagcgcctcgcccagggcctcctgctgggacaccaccacccacggccagacacttccaggagcacccccgccagcaactggccaccagctccttcctcctcttcttgctgacggggattgtgtctgtggccttcctgctgctcccactcccggacgaactcggcagccagctgcctcaagtcctgcacgtctccctgggacaaaagttggtggccgcctacgtcttgggcctcctcaccatggtgttcctcccggacctgagctccgtgctcaacccccagcccaccccaccctcctgggcagggtcttgaggcagccactgtgatgctcataccttaccttgcctcctaccctcttctctttcctgcctactccccactcctccctgacaaaaaacacccagggatttgtacccattttccaagttgaataaaatacatttttaaaatg

SEQ ID NO: 464 - DNA, 1138 bp, Homo sapiens
cattctagctgaggaaagagaacatttccccaaggtctgatgccttctgaaggtggaacgaatgtgtatgacccacgtggagcagcctctcactccgtccttcccttcccagtgggcagctgatgacacacttgggcagtgactttcccccaggggctggggtgctggatgtcatgtatgagtcccctttcacactgctgtcctgtggctatgacacctatgttcgctactgggacctccgcaccagcgtccggaaatgtgtcatggagtgggaggagccccacgacagcaccctgtactgcctgcagacagatggcaaccacctgctggccacaggttcctcctactacggtgttgtacggctgtgggaccggcgtcaaagggcctgcctgcacgccttcccgctgacgtcgactcccctcagcagccctgtgtactgcctgcgtctcaccaccaagcatctctatgctgccctgtcttacaacctccacgtcctggattttcaaaacccatgaccgtcagggccacccctgctctgggccagggaaaccagctactcagggacttctcttgcctggagggtgcagtgatagctctcctcactgccccactgtgctcctgggcctgtgaccccagtgctcaggcaccttgcactagaggcttctgactcctgggactttggagcttaccagagatgcagtccctcccaggaacctgttggagaggcaggacctgctgctttagagtgcggctgaacccgggccttgcgtccctgtttggccagagcaaggatctggcctggagaggcccatcctataccccttattagagccatgacagcctacagagtgaggtgaggtgctcccaccttcccagatggttcctttctgccccttcctggaaggaaaggtgaggctgccaatagcctcctggcaccagccagacctcacccttgaccaacctctcggggctgggggttcattcctggggcactgtggcctggttttgctttgaaaccaagaaagagcaaagggaacccagcagttctgagtgagttctgagccagccctacctcaggctggctgttgagacatgctacaattttcatttttgtaaaaataaagcttgattgttcaca

SEQ ID NO: 465 - DNA, 775 bp, Homo sapiens
tctcaaagtgctgggattacaggcatgagctatcatgcctgacctctttgcacattctcttgatctgttatgctgtttgttgccatctactgttgtcaaattctacctacccttcagggtccaactgaaatgccacattaccaggaaaggtttttctcattgtccctgccatacttcatttctcttctgcccttctgtagctcaggaccctctttaggtgtcactcccattagattgtaagtttcctaacaagacgcacgtcatcgtctccaaatcctttgggtcagcacagcctcttttatattaccagtctaagcccctttgtgtgacatttaaagtccgcctggactgactgttcagcctcatcctctgcccttcccttgtgtcctgggctctggccaaatcaaaccaccgttccccaaatgtactatgtagttaacttttaatattgcttctttttattgccttggttctctcaaaaatcagaattaatggaatgttggctattacaattacgtggacatggttatataatggccttggcgatgcccttaataaatgaaatctaaaatgttacattttttttggaacccagaaactcattctaattttattctgcctgaggctttatagcattttctgaagatcatgttgtactcttctttcgtctagatgatttggtcaacagtgataaagttccaacttagacttgataaatatgcaagagtcatgaaatatgaatgaaaacagtgacttttgaaaatcacgcttacct

SEQ ID NO: 466 - DNA, 1636 bp, Homo sapiens
ttaatttcttggcttgcatttgttgattgctaaggcaattttttctaatcttagggaatcattcagtagatgcgattaaaaaactaatgttgggtcaatttttttcttcattttcagcacaagaagtcctcttatatcctactaaatacattcctaaaaatgtatttgaacattggttctgtaaaagataatggactaaaaaagtagagaggagttgtagagatcttaaatcattctggaattcctaattatgcttcaatttttagacataattttagataatttatttccagtgttttctgcatgttctcatttgttctttttctcagttgaatgcaccaactggtttgagtcctgtgagcattcagtcagttgaaattaaagattcctcatttctcctgatttctattcttgtctcaatcttaaatttagagaccagttgtttttatgatatcagccatttgatttttttcattttctatttaagaaatatgaagaaaaaatacaccaagatggtcgaattactacacaaatcagcaccagcacagtctgatagctgcaaatgtccattcatctgctgtgtatgtatatccagaatcagcataggaagtcgttcaggatatcagtatataatgcacagaagtgtgggttgtttgaaagccaaacacgaaaattaggagcccctggattgacatttcaatgatcgctctaaccagtttatggattattatgaataatagtgtagtgtgttctttttcagaagttatatttgataatagagaagggagttttatgggaagtttctttgaagaattttttttttccaatttcgaatcagattatagcaccatgggagttgggaagtttgtatggcctataatgttctaagtcccagaaggaaaagatctgtaacaatctgaatagatgtggacacatatagcagagagaactatgtaattatctggcagaacaaaatagaaggtcctaaatcacgtaaactcaaacattgtagactagctttgtgtttattcttcaggtcccttgcgccttatttggttttgtatattcaacgaactgaaatatttggaattcctatttctacgtatttggtggtccataagactttgtcaaatgtaaacctacagtttgatacgctttaaaatacctagttaagaggatgatttctctttaatcgtttaaatgttctgaaaattaaaatcttttgaggcacatgaagtgggcaccatatatcatctagagtccttactggtattcaggatgaaaatgttcacgctgcattaattgtcatttttctctcccatgttctttctcactttgatacgttaatactgataatggataaagagtgagtttttataataaatggttttggaaaggtattcataggaaccgcggttatttacttagggttatggagtaaactagcttggaccttcgggctgcaggacgactaggattcacccataacgacacagtgccctatgtttctcaacttcttgttgccatttgaaactctgtactcttatgtttaaagggttctgtatagccattttttttttcagaaagttacattgctttgtatagaaataaaaggcattattaaaatttgcttgtt

SEQ ID NO: 467 - DNA, 1422 bp, Homo sapiens
atcgcttggacttcggggcggcctcggacggccatggcctttaccctgtactcactgctgcaggcagccctgctctgcgtcaacgccatcgcagtgctgcacgaggagcgattcctcaagaacattggctggggaacagaccagggaattggtggatttggagaagagccgggaattaaatcacagctaatgaaccttattcgatctgtaagaaccgtgatgagagtgccattgataatagtaaactcaattgcacacttgtgttacttttattatcttggatgagatatcaggtggagaaaatggagactcagaagaggacatgccagtagaagttattactttggtcattattggaatatttatatcttagctggctgaccttgcacttgtcaaaaatgtaaagctgaaaataaaaccagggtttctatttatctgtttttttttttaatgttgcacttgtagtttcattacaaaagatcagatcatgaaaggcagtaactctccaggactggaatatctgattgctcagtgttaatagtagttcatgctgtggtgagattgttaaaagggtgcaagactgttgcttctctttttttagatatttttctatctctcacttctcagggatgaaattctttttcaaagttttgaagttccttgcaacttagccatgatgtgagtggttatccctagataaaattaaaaggatttttaaaaagtaattactgcacataaaatgataaataggtaatttgaataattttattttaagctccttggttaattattttgtctattgtctcagctataaattcaaatttatacatactattgagtattaatattctctgatttcagggagaattctgtcagtcacatgatgattatgtttttgtttaacattctttccatgcacttgttattttattaatttgcctgaatgatgagaccagaccagtgtctacagattttcattgtcagaaaaatctataagtctgccctttttacaatgatgatttaaaaaaaacaacagcgtaaatattagcccacaagagcagtcctaaacaatcacaattacactgtactacccaagaagactgtttattgtgaagcatttacctttcaaaaaatcattacatttctatttcttggtggagcagcacattgtggagtgtgattcttaattcttcattgagtttgtcaataggacattgatgctggataaggttggcttttgtttttatgtctcagaccatcttgtgagattgtttgcctatctcataatacagttttatgcagaaaggttgaaactatgtaaatggtttttattggaaatatcagggttacaatattttaaaggtgtagaatggcatctttgtttatgggagaacatttgtaaataaagttaaatttctaagt

SEQ ID NO: 468 - DNA, 1727 bp, Homo sapiens
ggtttgcgtcgacatggcggttaccctgagtctcttgctgggcgggcgcgtttgcgccgccgtcactcgctgtgggttcgcgacccggggggtggcgggcccaggccctattggccgggagccggaccccgattccgactgggagccggaggaacgggagctgcaggaggtggagaggtaccggcttctccccgggccctcagcttgaagcagggcctcgtgccccggcgctccaggccgcgcccccttggcgccgggtgtcctgccgctgcttgcgcagcggcccttgtttcttcttacccgttgttaggggcgcagcgtcaggtgttcagctcccctgggaccactggtcccttcattagtgacgtatttcatcatcagtttagagagttcggcatgcttacaggcagttattgttctaggtgttagctttctgggtgtacggagcagctctaagccggcaacatggcccggttgcccttgcgatcaaagagaagagggctgggcgctccatgatttagcctgaggctcttcaaacatccattctgcttccacgcatggcttctgccattggttctcttcccccagcaccctgaaacgacagaaacaagcaatccgattccagaaaattcggaggcaaatggaggcgcctggtgccccgcccaggaccctgacgtgggaagccatggagcagatacggtatttacatgaggaatttccagagtcctggtcagttcccaggttggctgaaggctttgatgtcagcactgatgtgatccgaagagttttaaaaagcaagtttttacccacattggagcagaagctgaagcaggatcaaaaagtccttaagaaagctgggcttgcccactcgctgcagcacctccggggctctggaaatacctcaaagctgctccctgcaggccactctgtatcaggctctttgcttatgccagggcatgaagcctcatctaaagacccaaatcacagcacagctttgaaagtgatagagtcagacactcacaggacaaatacaccaaggagaaggaagggaagaaataaagaaatccaggacctggaggagagctttgtgcctgttgctgcacccctaggtcatccaagagagctgcagaagtactccagtgattctgagagccccagaggaactggcagtggtgcgttgccaagtggtcagaagctggaggagttgaaggcagaggagccagataacttcagcagcaaagtagtgcagaggggccgagagttctttgacagcaacgggaacttcctgttacagaatttgagtcggggcttggcttatggagatgcctcgtgagacacagctgggcaagtattaatgtatatggagacagcctggattttttgcatatggataagccaccttggaataggaagaggtgttgagcctggactgtgggaggaaagagctgcgtggatagattctaacttcctgtggtagtgctcccagtctgacatctgtagacatctcagtactcactcttcttgcttaggctctctgtgtgttgaaagccatcccgtgttgcatgtgttgttacaattttctgtgatacttgcaatttatgtttgagaagaagtgaaaagtttgccttctgacctcatttccttcttgatcagtgaacactaacattttggggacaacttagtcaattggttttccttacaacaaaataaagtaaaatgtagcagtc

SEQ ID NO: 469 - DNA, 2532 bp, Homo sapiens
acatatttcaaacttctgccttatattgtacggtgcagctagagaattatagttcactatggccattctctacataaacattaagatgaaatactcctcatcagcctttcatccttagtttgagaattagctgatatgcaatttgaagttgaggaaatatcattgatatttctatcatgcacgattattttagatttctaccaccgtgtgatttttgctagtccatgtgctagaggtaaacgttctgctggaattctgcatccagctctatccccctctgatgctttttgcccagaaagctgtctgtccatcatgtattgtccatggcaacaaattacattaggttgaacctttccttgattttatgtatttaatattagaatttgttggactcaactagatatattttttaatttatattttttccattttactttgaagatttgaaatgttcatacctgagcaaagtctacacaggagtaatggactgtttaacaagtttcccaaaacagcattttcctgctccttcgtatgtaggtgagaaacttagctggaaagacatacaaatttagactctcgttgacattgtcgttttaaaaggaagttgctaaggcgatcaatctcaatattagtcttgtttacttcttcttaatgtcaaaattaacatttacaacatccaattataaaagtaatgctttatgtttatacactgctatgtacttgtcaaaatggtttccacattcttatcacatctgagccttaccaggtagagaaggtactaaatacactttagaagtaaaaatatgaagtaccgagaggctaaacccactggcctaagatctcaccaaagttcatgaaaaccaggactaggacccacggctcccaaagcccgttcttgctgtgttgtgctgcctccatatccgtcaggaagagcctttccagaatgattctgggcatatactaagaagagcaggtatggaaagatctattgtcagggaatcttagaattccctacacgagtgggagaaagatgtccaaattccttacgcagtggtattcatgatggtgccctatctaagtccaggactgttttcctacagcgtgcctcaaaagtgttgtagagggcaggattctacattcacagcctgttccatctacgagattttccagatgctacttgtggtagacattcctaactcatggtacttagccaccagagatcatgatggaatgagtgggtggcttttctacctgccattccctcagaattcatgaggggtgggggacagggggaccggaattgtcttagcaccccaatgttatgacaaaactatgctactttagaaacgcagtctgtttttcaccaattgacatactactgatctgaagtaaccagtgccatcataagaaattactgcattaagaaaatccttgctgtgccctttgaaaagctgttcagaaatcatttacagtgatctttcatctcggtcgctgtagtgaaacattttagtgtgataaatttcaaaattctaaacaaattacccacttttatattggaaatctctaccagaactccctcttcattttttaaggcatacatttgcttgttttcaagatcaagaattctgagctagctttaagtagcaaactgatttatatgtgcaattataggatgcattaagatgaatgatagcctttacatattgaaaactttgcagacgttttgttttgaaaatggcattgtatagtaaatgcaaattaattttgtaaaattatgttaaagagtatgttcagacactttctgccatggccaaaaagtatgtatgaaagtatgtgtgtatttgtttgtaaaaggatgccaatgttttacctgatatcttagtgacacttcagttatctatgcattctttagatctgtgattcggtaaacaggcagccatgttcacgatgccttctatgtcttaccatatttttaattaacctgttaaatacagcttaaaatatttttattttatttattctatttttactgaaatatactgcattattgtgttaatgtattatctttcctggatattatctcccagtgtatccagatctaagtaatctcagtgaactatacattgcctaaaaagtggttttgtaatgatttgtagtcacatttctattgggatatgtagaagaaaaggcaaaatgcttaaagttccttttattttttaaaagcagctagatagacacagacttgccacctcatacatctgctccttggcaacatcaaggggaacgactagccaacatgcctatggctaaaaactttcctttgcagactaaagcactgcttggtgcttcgtttttctacccttcacaacatgtgtgatttcatctaagagatatatacatgtacacatgccctttgtttccacctggatacaagatcactcatagctaattaggaccattgttttttgttcatctgtcttgttgcatgaagggacattagacccatttcaattaaaataagttcttggtgat

SEQ ID NO: 470 - DNA, 1088 bp, Homo sapiens
caagagacaatttaacgttataaagccttctaaaagtgaactaaatattttataactttagtaatagcttggatggttttgagaaaataacctgtatttatcacattgtcaaacagaatttttctttgaatcagacaagttcaagctctaaattgatgtgctatatacttaaaatcctaggaagttatctgtaaccagtctcttgtctcaggctcttcaccttgttaccaatcctcgtaagtatgtaaaggaaacatatttttaaagaagcttaacagtaagaaaaaattactaaaagatgcaattcaaagataggtcccagtttaacactgaattgcttgacttctgtggcttttctttttctggccacatttatttatttaagcaatttttgtatgccttgttatttcatttccatagagattatattgtatcagtgtttatgtaagctggaatcatcctcagttttttgctgataatttttcaaataaagatacatggataattgtaaaatacactaactcttagggtgttgtagtagctgaaacatggagatgcgtagctgtcatgctttttctgaatggacaggagaaacataagctacggagtattcacttctgaggatgcttttccggaaaaagaaaggctagaaaatactcgcacttcctcagaaccctctttcttgttaacgggtatcttttgttggtgtgttttgctcttacattacagatagactatcatatatgactttatgaataatttcagttattttgcttttgtataagctgtctgaagccttgctatgctgtataagttgtgtttgatggatcagtgtgagtataaaataaagcaaatcacttttcttttgtattatctatggatgccactatgaaagctgacattaagccactaaagagttttctatgaataagtgtaagtaaatgctttgatatatataaacctaaataaaaagattgtattgatacagagacattggagaaggagattttaaggcagttctttaggtttaaaaaggcttgctgtaaaatggtgcgttattccgtttattaaagatcatattattgacc

SEQ ID NO: 471 - DNA, 635 bp, Homo sapiens
ggaaagagaaaactctggggtcagggagagaccctacccccacctaattatccagcatatatgtaagaaacatagcagcgatggtattcgatctgtgccatgactcttctgaatgtttggacaggttagagttggggacccctgttggccacttgttgacctctcatagtggtgcttgggccaggtcttctcaatggaaggggaatcccttataggggagagggaacagagcccagtgaaatggcagtcagaatgttaaccctggatccatctctaagtagagagagggtgcccattgcctaggtgagtgtgccaagctcaggattccaactggtgcctctgagcttcccaatcaatacttcctggagccagccccacccacccctgagaacagaggtcagacacagctgcgtaacatccatcctgctacaactcttccaccccaaacaaaagggctcaggctacacacgaccatgatttatgttttcaggggatgcccatttgtcccaagcttatcctgtaattctagaattacctggtgtcctgatgcattttccactagaggttgctaatcagcatgttttagcccaagtccgccttcctgctgtggttaacctgttatgttgcttttggaa

SEQ ID NO: 472 - DNA, 408 bp, Homo sapiens
ttttttttttttttttaaaaagtagttagcatttaatgaaactccctccatgtggcttcaagccaccaggacacaggcccccccaacactcttaatcttctcctcagctcttctgctgaagaatttggccttcacgatgacaggctgctttgggagctttccctttcccagaactttatagtagcccgatcgcaccacatcaatgatgggagcagccccagtcttgtttttagcagcattcacccgtgtctgttcactgaccaaagtccacaatttgtcaaggttgacagttgggcagaagctctggttcctctttaagtggtaatgcttcataccaactttcccaaagtagcctgggtggtatttgtcgaagttgatccggtggtgatgcagaccaccagcattacc

SEQ ID NO: 473 - DNA, 828 bp, Homo sapiens
caggcgcacaccacaggcctggctaatgtttttgttttgtttttggtagagacggggtttcaccatgttgccaggctggtctcgaactcctgagctcaagtgattcacccaccttggcctcacaaagtgtcaggcttacaggcgtgagccactgcgcccggctcacagggtaaggcttctgtctggtgtgttgtattacggattttgcttaataggcacagtgaggcattaaaaagaaaattcagtatgcctgtagaaaggataatccttgtttaaagtctccaaattgcagtcaaagatgttttgactgtgcctttttttgttcccctgctgtcccttatgtagacttctgtcagtacccatggcagcctgtcatcttgttgacatctccttctggactgtgagctctgtatctggcttgtttttcatccccagcttctagttcacaattaggtagaaccctattactctttgaagaaggaacaagaaaatgtgggccagttttcatttgccattcttccatgtgagttagtatggttcgtaagtattcctggtgatacgctagtattggcaattctgtgaggttgaacaaaggggtggtatggtgtgctagcgtgggaattaggagacctctgggtcttgacagtgccctggccactaagcaaaggcagttcatccttggagtctcaatgtgcttttttgttaattgagatatgcttgaagtatcagccctaaatagtctgattctgtgacctacaaacccttacttaattcagtgttactataaatgattcttcccttaaacctactttttacttagcaaaagag

SEQ ID NO: 474 - DNA, 2417 bp, Homo sapiens
gctggcagagatcaaggatagttgccagatagagatgtcaaaatgataagattccatttcttgccacttgatctttgtctgacttactctactagctgtaggttcttagaaatcttaagggtgaaataaattgttgtcaaacttttatcgttactcttaacatcttccattttgggaatatatgtcagcatcatcacaaaacaaaccataggttgaaaagtgtagactcatcctcagtttcatcattctgctattaaggatactccatcgttttttaattttggctaataatttcctaaatccatagctatgttttgttggttgacatttaatcataggagaatgtacttatagagattcaatatgccagagatgactgcctttgtatatcagccagctgctatgctaagacacttacactgaagtgaaaggttctaccacctcactttttatgtgtcattggagacactgaagtatattaccagtatctgactccaaaaaatcaaggtcagcaaatattttgaatgccctctaaaattactgcagtgtgccaccagaatgaaatgtcaccaaaaccccaggacaggagaaggaacatcttcctgccccctttatttttagctgcagagcttccttccatatatttgtgcaagtttgtcttctgacactgaaatgggagaacatagattttggcatcaagctggcctaaatacaaataaaacaggatgaaaaggttcagcttaataggttgttataatcagaaaaagaatatctacagtacatacagtaggcactgtactaagatgcttaccttgcaaaacactctcatatcatcttcacaactttatgggaccaggagttagaggtatgaaattgagcgatacaggattggaatccagtgttgtctgggtatacagcctactctacccactaattattcccctcatatattttatcacacacacccctctccacaaaaaaaaaaaaaaaaaaaaaaaaaaaaaaaaaaaaaaaggcgggagtccacttaaataatcctctatgtggttgataatgatctgaatctgtttctatgtccaaacctggtaaattttataatgtcatattgtttgtgcccagccctcctttggttagtgtactttgaacttcgatgtttgctgtgtttcaaacctgcaaggcaaagtaaaattagagcaagaacattcaaaccaaataaaatatttttcagctacagcaaataaaacagtgaaagccctgactatttacagtagtggtatccttactagattcataatgcaattagatagaaaaggtccaaaactgtaccctatgttcactccgggtcaagttgtgataaatttgatcccaatagaatacctccctcatttaagaaaaatcataactcactttacatatgaaagcctagtccagaaatctattacacctttatctcaagataggaagaaaatttcttccacattcatgtacaatgatgtaaatatttcaataacttagaatgcttcaagtttagtgcatgcatctctttagatccaaaatagaatggactgaagttatcatcctattgtcttttattttgtgtccttgggctataaaagattcctgaatgtaataataaggatttgggtttggaaatggagggaggaattttcattgccttctccctcatgcatgaagattcgaacagcttattttttccttgtatgacatattacaacactttaagtaaaatatagactggataatcaacatttgccacctctaaatatgcccaatttcataactagagtataaagtaattgtatgtgcttgccgctatttttttcttccttttaggatgatagatcataacagaacttattctccatctcaagatctgcttctagtgattgtgagtgccttgtgggcagaatccttgtcatttcctctttgggtctgtagcaccttgcatagtgcctggcatatagttggtgctcaataaatatggtttgaagtgaattgccctcacatgcttctggcaaatctctgtgctggcctgaaaccagtgactcatcttctcacataggtgttgtcaagtgatatttgattttgtaaaaataaccagtaggatccaaagaactttagctatttatgttcatcttcaaaaaattattttaggcaaagtccatactccttttaaaacaatatttatgtcctatgtttgtgtatagacatgactctactagggcataattagagtttgtgtattatttttccaggtttggggatgagtcagtccttgcccatccacaattttgtttgtgaacttataacaggaataagcaaaattcatacctgactagtgttcagaatgtagcattctgtgcgaaaaagtattgaagattagcttttaaaaactg

SEQ ID NO: 475 - DNA, 1087 bp, Homo sapiens
aatcttttaaaaaggtaaaactttgccttggtaaaacgacaactaacaaaacgtactggctataataagtccactcattataactaaaatgtatttaaaaagtaattttattttctataacatcttatattgctttgaagtccccattccagtggagtattagagagaaaactctcttttttatgtgtgtacttacatttttgttctgggtaagcatagagagaaaactcttaatcttgttcattaaaggaacttgggcactttctttttaaaatctactctttagaataaagccaatcacttttggataaatgtttgttttccttctcttgggtgggatctgggcacagggagaactttgtgtgagtaacatcatgtcaacaaactatttgcacttcctgaaatctagcccataggttttttttaaatgtagcaagtatataaatgtgcgggtatacacaggtataaattgtgtgtgtgtgtgtgtgtgtgtgtgtgtgtgtgtgtgtgtgtctcatatatatagtctataatagctaagaactaaaacggcccagctgaccgttctattgtgtggatgaccacataagaaggcaattttagtgtattaatcatagattattataaactataaacttaagggcaaggagtttattacaatgtatctttattaaaacaaaagggtgtatagtgttcacaaactgtgaaaatagtgtaagaactgtacattgtgagctctggttatttttctcttgtaccatagaaaaatgtataaaaattatcaaaaagctaatgtgcagggatattgccttatttgtctgtaaaaaatggagctcagtaacataactgcttcttggagctttggaatattttatactgtattcttgtttgaattcctcctctatttaagatatatacatggaatcgaagtgtttatgtaatagttctatccttttgcctgcaggtcagttgtaataaatctaggatgtgatgatgactatgtaatttgattttctgaaatcagaccctgagaggggaaaatcttaaagtaaattacattaaattatctgtgcatttcacaccaggg

SEQ ID NO: 476 - DNA, 504 bp, Homo sapiens
catttggctttttaccatgttccttcctttctttttcccgcttccttaatgtaatttaaaccctggcaaacattctttagaaaccaagaggaaagaaagaacaaatatcaaaaaagacatagaatttaatattgatacaatttcacctctaaaatggatttgaagaaatgcaactttatatcaaaaaatgtcatctgatttcctttgtttcttttttaaattatgtaatcagatgattttatgttttttttcaggggagcggaatattggtttcttttacttgttgttttcagttttctctgccattcatgtttcttttttgtgttcagtgtttcaaatacaatttgtatttaaggattttaaaataccaaactgtaactgagtacagtgggatcgttttctgttaggatgttaatattatacaatgaaatctataaagtgttgtcaatttgattattgacacatataacatgtttacaaataaactgtggtattgatcaagtt

SEQ ID NO: 477 - DNA, 404 bp, Homo sapiens
gcatgattttatttaaaatgtgtccaataagacttgccacttggaatgaacatttttacttctttcctcatattattagaaacagtatttcctcatttcatggagtttcttagaaagttctaagtattaacagaagagaaaaatgaaaccgtggggagattaaataacaggaagtttacaccacagcaagggtgctcacccatcccaatttcgggggacacacaagtgactattgggtgaaatagacccgatcatgcaaatcatcgtatgatcacttggtatcctttggcagttctgacattcattgtcactagcacagatattaaaatgagtcagatgactgcagtgaatgggaaatcatcttttgcttttggtggtggagagaagactaggaacacaaaggc

SEQ ID NO: 478 - DNA, 2525 bp, Homo sapiens
ttttttttttgaattcagtcaagtttattaaacttgctgtgtgctcagcaccgccctaggcagtaacatgaaaaacattacaaaagaagatctcaacaagggaaaaatatattctgtactatattaatttccaatcatttacatgttgctttttaaagtgttcttaggtcactttggggtatgtggtctccttctttctccatgttcccctaaagcttccacactgttgaattatgtgcctgtggcgaccatcctccaggaagggcaccttcctgctgatgaggcaaccatgggttggtcagggctggggtcccgtggtggaggagacatgctgagagaaaaaccatcaaccccgagagctcaggacactcacagtgaatcccagaaggccaaacgtggggaagccacaaagagggctctgggcccctcactcaccccctcccctaggggatgtgcttaaagtgctaacgccgtaggaaaatgatgcatagctacaagccgtcctgggtgctactagactcatcgcctgcctcttcctccctaacttgtgctaatactgggcgatggcacaggccaatagaaaagtctagtgcccagtgaagtagtagagaaggtccaacgtgtaacctagaattcccaagaggaggtgggacagaagagaagaagtgaagggcagagacgtgtgcagcaaaaaggacgtttgtgcttggccggtaccgctgggtcaggggttggtttctgtgcaaagggcaattgggttctgcacagctagcagggtcctaaattttacctgagggaacaaggctacatagcataggaaggaggaaaatccatgcagggccctccctgtcccccacacaggcacgcccccatgcctactgtacaaggtgctgtggagtactggggtggggtatacagcaggccatgccacacttggatgctggatgacatctgaacacccctggccaaagagctccctctggaagggcccagtcatcacatgcagggcccaccctgagtcagcatgaggggcttacgtccaactggtagccttgccaaagatacctgtgcccctgcgggttacagcccagtgaaatgcatcacgtgcatgacatggagggcaccccagccaggagggcaagcaaaagtggcagtggcataacttcttcacgttggtgacctagctaggtagaggatgccttggaggaatgggagggtgtccagaggccaagagaatactcctgtctcgccctcggctcagagccagatctcatcactgctcacgctggacactcgatagatatagcccagcactgggaggcggatgaaaccttggctggtgaggaggccgccgggctccgggtccagaagctctggccggctgttgttctgagccatctgccggtctgctggtttcactgctctggaatctggagtgaggtcattgagctgaaggttggacgggagggacatgttctcccgtggcaggcgcacgttgttgagttttaggttgttggagtcacttgatatcagagatgggtgccgggaggggcctttggttttcttctcttttctgcagaccaggcaggccaccaaggtgctgaaccccacgagggtgcccagtgcaagcccagcagccacaacaatgcccagcagtggcacttccacccgggtagccagaagccctggggctggaagcgacgcactggtgacacccacgtcattggtggccaccaccgagaggttgtgtgccaggctgcggagctgcagctgcaccgtgtggttggtgagccaggggtagttctgcgcatccagcaccaggaagtcagaggtgttgacagtcactggcccatcctggtcgatccaggtgacattggccggcgggttggcacgcaccagggcaaacaggacaaccaggaggcctgggccctgagcttcctggtacttggcgccgacttgggcaatctctggcttgaattgcacattaaggatgacagaggcgttggctgatcggccacttctggggtcctgcagagagcagttgagctcatgctgggcccgatgggcagtgacagtgaaggtgctggtgcctccagagaaggcctcccctcccacgctcagcagtcttgaggtgctggcctcctgcagctgtccatccagataccaggccaatctgggggtgccaggcccccctgccacccggcaggtgaaggcgtggcgttcattctcccgaagtgcccgctcagcccaggtctgaccatctatttgtggctccaactccccccaacctgagctcagaagggctggcaggagcagcagtgtgtgccggagggcggctgggcctggaggcagcgccatggtggcccgggcctaggccctaggctgctggctccctccccgagcgccgccggagcaactgctcaggtctgatgagcaccgcagtccgctgcaggggcgggggctgcgccaggcggggccaatcgatgcccgaccacgggcccgaggggcccttacccggcaggtgg

SEQ ID NO: 479 - DNA, 544 bp, Homo sapiens
aagaaatagaagaactcaccaagatttgtgacgaactgattgccaaaatggggaaaagctaactctgaaccgaatgttttggacttaactgttgcgtgcaatatgaccgtcggcacactgctgttcctccagttccatggacaggttctgttttcactttttcgtatgcactactgtatttcctttctaaataaaattgatttgattgtatgcagtactaaggagactatcagaatttcttgctattggtttgcattttcctagtataattcatagcaagttgacctcagagttcctgtatcagggagattgtctgattctctaataaaagacacattgctgaccttggccttgccctttgtacacaagttcccagggtgagcagcttttggatttaatatgaacatgtacagcgtgcatagggactcttgccttaaggagtgtaaacttgatctgcatttgctgatttgtttttaaaaaaacaagaaatgcatgtttcaaataaaattctctattgtaaataaaattttttctttggatcttg

SEQ ID NO: 480 - DNA, 543 bp, Homo sapiens
gaggggtgctcctgatgccccgggtgcagggcgggcaccagcgagcgagacccaagggcgctagaacccaggagcgcaaaccaccgttagggcctgagggacgcagaggcgggtggagtagtgtttctcagattcgtgggaggccgcaggcgccagcagaagcaattttcctcccctgagcaatgctagttctcctcaggcccaggatctccactaacgtgtccttccacctcctcacaggactccaagctgctgtcccctctctgccgcatctgaggctgggaaaacttcctaggagaaggcaagagaaagccaccagaccagagccgaggactaaactttaaggtcgaagacggcagaggggcaggttctcccctgcacaccccaaggcctctcctgcacccgcgaggccttccttgagcgcccaggcccccgaaatgcctgccctccttctgacaaaaggagggggtaggatgtgaaggggtagtgcaaccaataatgtttttgtaaacacaacaacagggaaatacatggaggaaatct

SEQ ID NO: 481 - DNA, 482 bp, Homo sapiens
  misc_feature 481,482: n = a,c,g, or t
cgcgcggaggcggaggcttgggtgcgttcaagattcaacttcacccgtaacccaccgccatggccgaagaaggcattgctgctggaggtgtaatggacgttaatactgctttacaagaggttctgaagactgccctcatccacgatggcctagcacgtggaattcgcgaagctgccaaagccttagacaagcgccaagcccatctttgtgtgcttgcatccaactgtgatgagcctatgtatgtcaagttggtggaggccctttgtgctgaacaccaaatcaacctaattaaggttgatgacaacaagaaactaggagaatgggtaggcctttgtaaaattgacagagaggggaaaccccgtaaagtggttggttgcagttgtgtagtagttaaggactatggcaaggagtctcaggccaaggatgtcattgaagagtatttcaaatgcaagaaatgaagaaataaatctttggctctccnn

SEQ ID NO: 482 - DNA, 852 bp, Homo sapiens
gattaattgctttatagtacaggtaaactttgagaataagactatgtttcaaaaacagtaagtcccaaataacaataactcgtgcattaatggagcgcattcctcgtttttagttcaccttgcttatacctgatgacttggtttctaattcattatgcgagtcagtgagcacctttaagggtttatgacagtcatctaattgtcttggtcagggccaaaggacttggttatatgcttttcataccaaaatgacataatttcattgaggaatctgcttattaacccattcccctaaaaatgcccaagttaaatataaagaattttttctctctctctaacttgaagttacattgcaacatgtaactctaagacttaaatttcagtgagctctccctggcatcttcttgggccctcaaggtgacacctgtgtcaagctgtactctgtgtagtataggtgaccctctttctcaaggaccggacatgccaaaaaggtttccctgcccaaaagcataacccaacaaggagcatctgggaaggggactccttgcctcaaccccaattattcatttgacaaggaactgtctatcacctactctgccctagccctgtgctaggtgctgtgggcactggagtgaacaacaaaaactaataacacttgaccacattgaatgtaccggatcattcattgaatgatcactaatggagagttacaaagcaatgggttctgaaggaaaggtacagggttctatgagggaaatagccaaggagcctgatgcagactgggggctgagggacagcttccctgaggtaatgtgacttgggctgaacacttaagaaagtggtgaaaacttt

SEQ ID NO: 483 - DNA, 955 bp, Homo sapiens
gaatagtctgatgatctgacttggttcctgtacggtccagtttgtacataaacatttttgtccatagggacagtgagtgttactgatgcaggttgagagctacaatggcactatccaaaaacaaaacgaaaaaccctacatggagcttgttcctctgctgcattatgcagagatgggtctcaccccgttctttcatgtgagaataagcaccttattcattatagaaacattgtgggtgtttcctgttactcattgctgaatgcagtccctcagtttattttgaattatgtttgagtacatatgattacaaacaatatacatgtcctcctcaaacaaaagttctctacacatttcttagaaatattaacagtatgcaagcaacttgcatactgtctggtgagttttgtatttattgagaatatatattaaaatatcccattccaatcatggatccgataaactttataattaagctatttgtccaacattgtgagtcaatattactgtgagcttacaacttcaggcctttttttcctcataaattttagttttcatgcttatttgattacaacttttatgatgatagtagtttttcatatgcataataccaaaagtcaaatcatgttgtgagtgatttctttccaaggactatcagggacgtccctgttgtcaagcagggtgtaataaattgtggtaataaatactaccacaggccgggcgcggtggctcaccctgtaatcccagcattttgggaggccaatgcgggcagatcacttgaggccaggaattggagaccagcctggacaacatagcaacaccctgtctctactaaaaatacaaaaattggcctggtgtggtggtgcacatctgtaatcccagctacttgggagtggaggttgcagtgagccaagcacgccactgcactccagcctgggcaacagagtgagactctctc

SEQ ID NO: 484 - DNA, 488 bp, Homo sapiens
aggagttttaagtatgttaaaaatctatactggacagttacaagaaattaccggagaaaagcttgtgagctcaccaaacaaggatttcagtgtagattttgtctttcttgaacttaaagaaacaaatgacaaagtttgaatggaaaagcctgctgttgttccacatctcgttgctgtttacattcctttgtggagcctacatcttcctaagctttttagcaggtatatgttgaacacttctgtttcatggttgagacagaatcagaggccatggatactgacaactgatttgtctgttttttttctctgtctttttccatgactcttatatactgcctcatcttgatttataagcaaaacctggaaaacctacaaaataagtgttgtggtttatctagaaaaatatggaaaatattgctgttatttttggtgaagaaaatcaattttgtatagtttatttcaatctaaataaaatgtgaattttgttt

SEQ ID NO: 485 - DNA, 801 bp, Homo sapiens
gagcccccggagctgctaccgtggcggcggcgctgtgaggagcagccagggggaggcagctgcggctcgccggtgagtatccgggaagcgccaccatggggctccgtaagaagagcaccaagaacccccccgttctcagccaggaattcatcctgcagaatcatgcggacatcgtctcctgcgtggggatgttcttcctgctggggcttgtgttcgagggaacagcagaagcatccatcgtgtttctcactcttcagcacagtgttgctgtccctgcagcagaggaacaagccacgggctcaaagtccctctattattatggtgtcaaagatttggccacggttttcttctacatgctggtggcaatcattattcatgccacaattcaggaatatgtgttggataaaattaacaagagaatgcagttcaccaaagcgaaacaaaacaagtttaacgagtctggtcagtttagtgtgttctactttttttcttgtatttggggcacattcattttaatctctgaaaactgcctgtcagacccaactcttatatggaaggctcgtccccatagcatgatgacatttcaaatgaagtttttctacatatcccagttggcttactggtttcatgcttttcctgaactctacttccagaaaaccaaaaaacaagacatccctcgtcaacttgtctacattggtcttcacctcttccacattactggagcttatctcttgtacttgaatcatttgggacttcttcttttggtactgcattattttgttgaattactttcccacatgt

SEQ ID NO: 486 - DNA, 668 bp, Homo sapiens
atgagaccaccctgactaacatggagagaccctgtctctactaaaagtacagaattagccgggcgtggtggcgcatgcccataatcccagctactgaggagacttgaggtaggagaatcacttgaacctcagcggcggaggttgcagtgagtcgagatcgcgccagtgcactccagcctgggcaagaagagcgaaactgggtctcaagttaaaaaaagaaagcaaggaaagagtaatttacaacgaaggaaaaaaacccacagcacacccttcgcggctgtcagcgctctcctgatgtcacagtggctgcgtgtccttggggtgggtgaggtgtggggagcccagcccctggccctgcctcccgcgccccgctccccttctctctcttactcggttaagccatagcgaggcctccgctcgtttcagatatgaatttgttttatagattataaatatgcatatacagtgtatgtataaagcagaatgcctgcctttcctggttattttttgtaccatattgtaaattatattatttattctttaccaattttgggaataaaaggtgttttggttatttaatataataagagctgttaaacttctgtttaaatttccagttcaacttgtaaatgtttttattgtgcataaatacatactaatgttgatct

SEQ ID NO: 487 - DNA, 852 bp, Homo sapiens
aatcatatgaatcattagtggttaatgtttgaaaaagctcttgcaatcaaatctgtgatgtattaataatgccttatatattgtttgtagtcattttaagtagcatgagccatgtccctgtagtcggtagggggcagtcttgctttattcatcctccatctcaaaatgaacttggaattaaatattgtaagatatgtataatgctggccattttaaaggggttttctcaaaagttaaacttttgttatgactgtgtttttgcacataatccatatttgctgttcaagttaatctagaaatttattcaattctgtatgaacacctgggaagcaaaatcatagtgcaaaaatacatttaaggtgtggtcaaaaataagtctttaattggtaaataataagcattaattttttatagcctgtattcacaattctgcggtaccttattgtacctaaggggattctaaagggtggttgtcactggtataaaacagaaagcactagggatacaaatgaagcttaattactaaaatgtaattcttgacactctttctataattagcgttcttcacccccacccccacccccaccccccttattttccttttgtctcctggtgattaggccaaagtctgggagtaaggagaggattaggtacttaggagcaaagaaagaagtagcttgggaacttttgagatgatccctaacatactgtactacttgcttttacaatgtgttagcagaaaccagtgggttataatgtagaatgatgtgctttctgcccaagtggtaattcatcttggtttgctatgttaaaactgtaaatacaacagaacattaataaatatctctagag

SEQ ID NO: 488 - DNA, 367 bp, Homo sapiens
cggacggagagcgcgaggactcggcggctgagcgcgcccgacagcagctagaggcgctgctcaacaagactatgcgcattcgcatgacagatggacggacactggtcggctgctttctctgcactgaccgtgactgcaatgtcatcctgggctcggcgcaggagttcctcaagccgtcgggtcagtgcccggggaatgcacacccgcctgattccttctctgccggggagccccgtgtgctgggcctggccatggtacccggacaccacatcgtttccattgaggtgcagagggagagtctgaccgggcctccgtatctctgaccacgatggcgcttacctttcagacttcattaaacttatgaccg

SEQ ID NO: 489 - DNA, 1436 bp, Homo sapiens
  misc_feature 1170: n = a,c,g, or t
ggggaggcggaggcaccaactaagagcgacctagcatcgcaaagccgccctcgggggctcatggcgggacgctcctgggaaaggctttagccgcggtgtctctctctctggccttggcctctgtgactatcaggtcctcgcgctgccgcggcatccaggcgttcagaaactcgttttcatcttcttggtttcatcttaataccaacgtcatgtctggttctaatggttccaaagaaaattctcacaataaggctcggacgtctccttacccaggttcaaaagttgaacgaagccaggttcctaatgagaaagtgggctggcttgttgagtggcaagactataagcctgtggaatacactgcagtctctgtcttggctggacccaggtgggcagatcctcagatcagtgaaagtaatttttctcccaagtttaacgaaaaggatgggcatgttgagagaaagagcaagaatggcctgtatgagattgaaaatggaagaccgagaaatcctgcaggacggactggactggtgggccgggggcttttggggcgatggggcccaaatcacgctgcagatcccattataaccagatggaaaagggatagcagtggaaataaaatcatgcatcctgtttctgggaagcatatcttacaatttgttgcaataaaaaggaaagactgtggagaatgggcaatcccaggggggatggtggatccaggagagaagattagtgccacactgaaaagagaatttggtgaggaagctctcaactccttacagaaaaccagtgctgagaagagagaaatagaggaaaagttgcacaaactcttcagccaagaccacctagtgatatataagggatatgttgatgatcctcgaaacactgataatgcatggatggagacagaagctgtgaactaccatgacgaaacaggtgagataatggataatcttatgctagaagctggagatgatgctggaaaagtgaaatgggtggacatcaatgataaactgaagctttatgccagtcactctcaattcatcaaacttgtggctgagaaacgagatgcacactggagcgaggactctgaagctgactgccatgcgttgtagctgatggtctccgtgtaagccaaaggcccacagaggagcatatactgaaaagaaggcngtatcacagaatttatactataaaaagggccgggtaggccacttggcctatttactttcaaaacaatttgcatttagagtgtttcgcatcagaataacatgagtaagatgaactggaacacaaaattttcagctctttggtcaaaaggaatataagtaatcatattttgtatgtattcgatttaagcatggcttaaattaaatttaaacaactaatgctctttgaagaatcataatcagaataaagataaattcttgatcagctat

SEQ ID NO: 490 - DNA, 1460 bp, Homo sapiens
aaatctctctcatggctcatgttcacttcccttttcaagttgaagaggtttcttttttggtgaccactatggtatatggtgggcaatgccctgccagtcccaacggtagagaaaaataggccgtcccccacaactctacaattaacatcagaggaaattttttacaagttcatcttactatcactttttaaaaagagaaacatctgtttgaaaatattctctgtgatgatttccttaattcactttgaaatcagtttcttactatgaagtcattaatgtaagaacttggccaacaaagcttttcttctcataggctggctctactaggggaactagtgtttggtaaactgctgggactaccacaatgggaggggtacaggtataaaattaagttatcttaaaatgtttcagcaatgatgcacgtaggagaccataataggtggtggtaaatgttttgcccccgtataggaatgattttaactaagacgtatgctattccctatgcaacaaattatcaaacaggatatgtcttgtgacctgtttttttttttaaggacacatttttaatagctgaaaatctctgataatgaattagagtgtgtagtaaacatgagaattagttatattatcttatttttaaaattcaagactaagaacttcagagaatgaagagtctattaaaatgaggttcatcttaatgataggcaaaccaaactcatactgcttgacatgttttgaaaactggtaatattgagggtgtacagcacatgtacttaaaaatgacactggactatcttttgctctgagccatgccacttaccgaaattgtaaatacatttttcacaaatgcattgccaattattaccatccctcaaagcaataaattgtgacagttgctttaaatgtttgtcagcaactgttttcatttgttcagatattttgaatagctacactaataactggtattatttggtgaacataaaaaaataaatagatctgtatattgatggtagactctccatattgaaatgattattttccaaacattttcattttggtcaataattcaaactaccacttaggcaaagtattcgaacactgtgtcctttgtttaaggaaatataaaaaaaaatcacctttctttttgtgcaaaaaaaatattatttcaatcacatttcagaaccgccagggcaagaaagtataaagcaggatcatgttaagaaaaaagaaaaaaagatcatgagtcacttaaatatgtatttttatttgtaacaaacaagtattaaactgtaaagtatttttgtacaaatttaatactttaatagcatggtatttatcgtctatgtatggttttggggaattcaaaattgttcaaatatttgtatggaaaaaaataaaaccctctaccaaatggaataaacagtgattttaaaaagccaaataaagaggatatgcctttg

SEQ ID NO: 491 - DNA, 2614 bp, Homo sapiens
cttttccctctctgtcagttgcggtatttgttgagtaaccataattattgtgtatagtttaaaacccaaagtctaactccttcatatatacattctcttcatctgtcttcctagtccatctgtctcttttcctccgtctctgtctctctccctgtctgactcgtttgcctttctttgtctctccacctttttgtctctctcttcctgtttctttctctctctgactctttctcggcctgcctaaaggcagagtctctccctgccttcttctctccccacacgccccccgccccgttagttcatctcctctcctggtctgggctggcttcatcttgtgcctccacacctctccctgtgccccacccttcactctctccccgcataactctcttccgcatgtatatgtgtatccatgtctgtctgtctgcttcttaccatctctcctgaatctgcctatgactttctttctacccattcctacaaatgcttgcagtcttctgttttctaagtcccaacagcttatgtttttcatttctggagcagggtctacaggtttcaccaaacagaagatctcgccctgggatctttttgaggggttgaagccgtcagcaccactctcttggggctggtttggaacagtccgagtggaccggcgagtggctcgaggagaggagcagcagcggttgctgctctaccacacacacctgaggccccggccccgcgcctattacctggagccactgccactgcccccagaagatgaggagccgcctgctcctaccctgctagagcctgagaaaaaggctccagagccccccaaaactgacaaaccgggggctgctccacccagtactgaggaacgcaagaagaagtccaccaagggcaagaaacgcagccagccagctaccaagacagaggactatggaatgggcccgggtcggagcggcccttatggtgtgacagtgcctccggaccttctgcaccacccaaaccctggttctataacacaccttaactacaggcaaggctccataggcctgtacacccagaaccagccactacctgcaggtgagtgccagccactaggaatgctggagggacctacctgtacactccccctgcccaaaggatgatgccattcccctgaggagctatggatgtcaaggacactgagcaagagacagagggatgaggagcctagaggtcagaccactctccttttcaagtggccctcgtgtggacccataccgtcctgtgcgcttaccaatgcagaagctgccacccgaccaacttaccctggaatgctgccacaaccatgactggcgtcatgggtttagaaccctcctcttataagacctctgtgtaccggcagcagcaacctgcggtgccccaaggacagcgccttcgccaacagctccaggcaaagatagtgagaggggcagtagggagggctgtcagggagaggggcttttgagggtcacaggacggaggagacacttgggatcttcacaaggacactcagggtgggagacacaagagatgagatggcagcaagcatttcctgagtttgagttgttctcttttctccctttagcagagtcagggcatgttgggacagtcatctgtccatcagatgactcccagctcttcctacggtttgcagacttcccagggctatactccttatgtttctcatgtgggattgcagcaacacacaggccctgcaggtaccatggtgccccccagctactccagccagccttaccagagcacccacccttctaccaatcctactcttgtagatcctacccgccacctgcaacagcggcccagtggctatgtgcaccagcaggccccacctatggacatggactgacctccactcaaaggttttcacaccagacactgcagcagacacccatgataagtaccatgactccaatgagtgcccaaggcgtccaggcaggcgtccgttcaacagccatcctacctgagcagcagcagcagcagcaacagcagcaacagcaacagcagcagcagcagcaacagcaacagcagcagcagcagcagcagtaccacatccggcagcagcagcagcagcagatcctgcggcagcagcagcaacagcaacagcagcagcagcagcagcagcaacagcaacagcagcagcagcaacagcaacaacagcaacaccagcagcaacagcagcaacaggcggctcctccccaaccccagccccagtcccagccccagttccagcgccaggggctttagcagacccagcagcagcaacagacagcagctttggtccggcaacttcaacaacagctctctaatacccagccacagcccagtaccaacatatttggacgctactgagccacctggaggaactgcttgtgcactggatgtggccccaccctttcctcttaattcccaatcccattcctgggctagcaccagtagtggttggggccctcccctcaggctccatttttaataagtttttagtatttttgttaatgtgaggcattgagctgttgggttttgtatattatttatatagagaccccagagctgttgcacccaatacacagagcttctttgcaaaggg

SEQ ID NO: 492 - DNA, 587 bp, Homo sapiens
caataatggtaaacatttattgagttctttgtaaagcctggtactatgttaaacattctatatacatggtctcatatagtccttacgagtcaatgtggtaggtaatcctatattcctattttagagatgaacaaaaaaaaaggctttgagaatttatcaaggacccataataatccacagaacctaaattcaaatccttttgtccaactccgaagacttatctcttaaccacttcataagattaaaacgctgaaggggcacatactgttatgaattttaatggctcctacacatgcatcctttatatatacccttcatgatttttcaaaccatgtcagattctcatttttcaattctcaagatacagcatcttcttatagcatcttcaccacctttcccgtttactgtcttaaatgtgcccaatctcggaaatatcaataacaaaacaagcttgttgacattttgtgaaacatttaaggagacttccaaggaatgtaacatatgtagactttgtgacacatatattggcatgtggtcacagctctgttctgagatgagatgttactatcccgattgaattctagact

SEQ ID NO: 493 - DNA, 772 bp, Homo sapiens
cagactcccaagtagctgggattacaggagctggccaccacaccctgctaattttttgtatttttagtagagacagggtttcaccatgttggccaggctggtcttgaactccagacctcaagtgatccgcctgcctcggcctcccaaagtgctgggattacaggtgtgagccactgctcccggccttaaattgcttttctaaccctctatttttattataaggctgccctcctgctcaccatagtatttctcaggaaccatgtatggatgagttctgtagtgctcgtgaaccatttgagaaggggtgctgatggggctacggctccaggctgcatccctgaaggagtcagctttgttttgcattctgtggccaggctactgtttcttacagtgtggtctgtggaccaccaccttcatccacaagcgctttctttataagcactttctggagctatgtctctgacttgctaaagaaaagctctgtgggcagagccaagaatctgcatgatgacaaagcccacatgtgattcttacgcccttgaaagtctctcctgcaactaacctctgccatggccttaccccgggccccattcagctgtctttctagtggatccctggagccccatgtggcccagagaggttctggggttgtggggtacagtggagcccacagacaagacttggagccctttctcttcccagctccgtatttgtgtattttatgtatttggaaataagcatatgattttaattgaacaaaagatctgttgct

SEQ ID NO: 494 - DNA, 705 bp, Homo sapiens
cccaggccaactggaaaatctcccaggctaggccaattgccttttgcacttccccgttcctgtcacatttccccagccccaccttcccctcctgatgccctgaaagcttccggaattgactgtgaccacttggatgtcaccactgtcagcccctgccttgatgtccccatttagccatctccatggagctcctgctggagggccctgaaccctgcactgcgtggctgcccagccagctgcctcctgtcctgggaggaggcctcctgggtgtcctcatctggtgtgtctactggagggtcccacaggagaggcagcagaggggtcaggggaggtctcctgccgggggttggcctctcaagcctcaggggttctagcctgttgaatataccccacctggtggtggcccctccgatgtccccactgatggctctgacaccgtgttggtggcgatgtcccagacaatcccaccaggacggcccagacatccctactggcttcgctggtggctcatctcgaacatccacgccagcctttctggggccggccacccaggccgcctgtccgtctgtcctccctccagcagcaccccctggcccctggagtggtggggccatggcaagagacaccgtggcgtctcatgtgaactttcctgggcactgtggttttatttcctaattgatttaagaaataaacctgaagaccgtc

SEQ ID NO: 495 - DNA, 426 bp, Homo sapiens
ctactaaaccatgagcatcaccaagacagggaccacgtggttttgtttggcatcttgatgcatagccatagttcctcacacttactagaatctcagtgattgattttcttttctctttgctttacagtcagctacttctcatctggtgatatttattcatggaacatgaattttaagatatactggctatggttatttttctcatcctgcactactagtcatcacttcataatacagtttctttcacatgccagagattctaaaataagctgcctagacacggtgcctgctttacctcttctttctttcatttctacttttttttttcattctcttcccaagtagcatattcttccagcctctacatctttttgtgtttttggtaaaagcatgttccttaggaggtaagccattagtcaccttttt

SEQ ID NO: 496 - DNA, 957 bp, Homo sapiens
  misc_feature 751,783: n = a,c,g, or t
gaacctcaaactagatggtttggagcaaatagcatggaagtaatttgaagaccatattctcttcattgtcacattgacattcaccctgtaaaatcatgatactcttttctgccatagaaccatttcttaaattcgcatttcatgattgtaaggtggtggtctcactgacacttgtcatggtgggttggtggagaggaccgggggtgggaatcacggcagacccagtctgtctgcaacagcggagcctttggagggtgctcaaggaaacactggtagaaatggagggaccaactgaaggaaaattttgaattcaaaattgaagagtttggttctgtgtttcccataatatgcttgataggagaagcaacctttgtagctggctgtgaaatcagaatacatcttggagttctcttacacccccaggggccctttcaaatccatacgatttagaagtttcactgagtgatgggtttggtttattacggctttgtcaaaccaagctaaacaaatttggcatgggatctgtacagtctgttgtgcagtgattgtgtaacaccagcttcttgtccagttctactgtacaagtactgatagaccaaggtttaagtatgtttacgttttgacattacatgatattttgtagtaataataatgccaaaatattcttaaacgccttctgtatagaaactttggtaaggcaaggccaggtgcggtggctcacacctgtaatcccagcactttgggaggcaanagcaggtggatcacttgagatcaggagttcangaccagcctgaccaacatggtgaaaccctctctctactaaaaatacaaaattagagccaggcgcagtagctcacgcctataatcccagcactttgggaagccgaggcgggtggatcacctgaggtcaggagttcgagaccagccttgccaacatggtgtaaccctgtctctact

SEQ ID NO: 497 - DNA, 1342 bp, Homo sapiens
  misc_feature 409,468,1113,1319,1320,1325: n = a,c,g, or t
ttcttcattctgattttatttgttttggatatatatccagtagtgcaattgctgttatgacatggtagtttaagttttttgagaaatctctattttgtttttcataatggctgtcttcatttacattccaaaccaacagtgtgcaagccttcccttttcttcacatctttaccaacgctttttctttttaataagagtcattctaacaggaatgagttgatatctcctagttttgttttttcttttttggcttgcctttttgtgataattgacattgagcatttttaaatatatcagttggccattatgtatgtattttcttgaaaaatacttatttcagctacttatttttaatagtcacttatttttgttgtattgtcatttgagtttggtatatattttttatatnaaccccttgtcacatgtataatttgcaaatattttctccctttttttagttgtcacatnctgttcattgtatcagattctgtgcagcagctttttaatttgaagtgatctgactgacttgttcttccttttgtgtcccgggatattttggttaaatcaaaaaacttgctgcccagaccaatgttatggggctttcactctattttttggtagtagtagtttaagagttttaggccttacatttaagtggctaatttattttgagtttatttttacatatggtgtgagatgagggtctcactttttttttctctgcatgtggacataaagttttctaaacatcatttattgaagatactgttatttcccttaaaaaaaaagtcacctgtattaaaaacatttagctgtaaatacactgatatatttctgctctcttttcttctgctccatggcctatatctctgtttttattcaagtgacatactgttttggttaccactgttttgtagtgtatttcaaagtcagggtgataccttcttttgtcttgattgctttggctatttagggtgttttgtggtaccatatgaattttcgatatgctttttaaaaatgtctatgaagtatgtcactggtattttgatagcggttgcattatatctgcagatcattttgtgtaatacaaatatttaactattaaaaatgccngttcatgaatgcgtaatattattccatttatgtgttacttaatttgtataatgttctttggagtagaatgtaaggtgtttcaactttttggttaaatttacttcaaactatagttaggtagatggaatttttttgaatttcattttgagatagttactaatgtatagaaatgctatgactttttggtgatgtttttgtattttganngtttnataaattttgtttgttt

SEQ ID NO: 498 - DNA, 1556 bp, Homo sapiens
gaactggaggccaatctttcataaagccagccccatagctgcttgctgttaggcctccagccattttgacattggggtggatagtcgattcacctgcctgtcagtcgattcacctgcctgtcacccagttctgtggatgtgctggtgctgagcctttgctctctttccaaatggttacagggatgttgatcagctccaccagagggagctctgatgggaggaattgctctgccatccttgtccctgtgtctcctgtcggcaggcagccattgtatctcaccagcagaccaggagactggtcccaaggttactgcaccacagggcaatttcctgccatagttaggaaggaaacacctgaactaaatggaagagacatccctgcggtgtttaatatcacacccatgccctttgtcaggttaccatgtacagagattacttggagagcctcatgccgtctctaccttcgcacactggtcaagtatctgctgagcttcttggccgcaaggatgcagaaataggctgagggtccatgggaagaaagacacaatgaggcagtaggaggtggggaagaaaagaagacagactttcaaaatggaattaggcactggggagagatcagtttccccacatcagggagaagaagtataggtggggaagggggtggccaggagcagaaggaagaagactcaagatggaaagggagccgctgtgcctgtggcaataccacttggagaggtcgacttcataccttcaagccttttcccctgggcttttgattgtgtctgtgccccctttcttgtcctctctgcagatgcccagtaggggctacctcatcctcgtgctgttcttgtgtggctttctgggcagtagggatcttgaatttcctttctaacactgtgcccggcaaggcggggagcattcctctgccctttgtcttgtgccaacctggaaaggtgcagtctagatttcagtgagaaccctgccagctgagccctgtgcatctactaccttgacacagagtgttttcccactagaagctctgctctgctctcctggcccaagtaggggattccatgccttccctttcatggtcttagcaccagcagcctagtttctcccttccagagtctccagggatgacaaattggattggagacaaacctcgtcagatgctcatcccctaaaaggttaattgtgtatttgtggctgcgtgtgcctttgtgttttcattctcttcccatttttgtacattttggtcttctctgtggttttatacttggtcaaaagtactcgtcttggtattgcactgttgtgtgcatgagaaaactgggggaaggctcactggtacaagaaaggacccctgacccctttccttctctgtggtccccggcattagattgggggttctgggagaggcaggtgaatgtcctaagtgaattgttctgtttgtaactggaatgtttttgaagtctttggtgttgctccgtgaaaggacatcgccacctggtgctcatgaggtgtctttgcagaacaataaatggcaaatgaacaaccac

SEQ ID NO: 499 - DNA, 772 bp, Homo sapiens
tgttttgaaaacctcactgtgggagattcaggcatcctccctaagccagctggccgctgtgctaaagcctgttcagagttaataataatcattagctgaatggtgctggggcctttcagcttcagatctctaagcacttgcaggctgagtcagtcagccctcaccttccccctccttcctgggctgcagagtgtaacagaatgggaaggcactgtgggaaggaagtcaggaatcttgctgctagccacgccttgcagtgacttctcgtctgggagtgggcactgagtcctctcagtaaactaataagacttgcacctgacaaaggtcaagatatgtagggaacacagtgtatgctaggctgagacctatggtggtggcaggggtggctgttgagcctgaacttccagtactcctgcccttccttctgtttacctggcttggcctacagggggcaccctggtcttgatgcctcaagcccagcatttctgggtcccctctgcaagctcagagagcagggaggcttctggtagtgctcttgatgctcctgtgtctggttggcacaaagatcctgtgtaacatgaaatgaaaggtgcatcagcttggggggctgggaaacctgcagtatgggtttactccgtccctatcactggtgtggctgtgggcaaaccacttattgcctgacctacctcacagggatgttgtgagggtttgatgagagaatgaatgttaataggaattggaaaattcaaagcattaaacacatgtaaacagg

SEQ ID NO: 500 - DNA, 650 bp, Homo sapiens
accatgcgcgtgttaacctttttcccccccaagataagggctcacatagtgagcccttatgatacctatgagaataggtatcgtagaagagcagactagactgtttcacagtctggggaagatgaaaacagctctgccagactggaatttaggcatactcctcatctttcttttctgttcctttaccctgccctattatcaggtcttatctacacatgcttacctactctttctagaagtctctttgaaatgtatttttccataatctcattagtgtccaaatgtataatgtagcataatttgtatcatttaaattgcaaaatgtggtcaggtcttccttgtctatcattttttcccattcatccctttttcctctccctctaaggctgagatattgctgtcaaggaagtggattggtgacagggaagaggtctcaagtggaggggatgtgtatgaatgtatgtagagggggcttgctcagaggcctgagcagcagtacgtatggtatccaagaaataagggcgagaagacccaaggcacaaaggtagaaggtagaggaggctataggggaaagattggttacattgagcaaattaataaatgtctttacaggtatgggagctaggtttctccctgcaaaaagagaatat

SEQ ID NO: 501 - DNA, 6274 bp, Homo sapiens
ccaccatgcccaactaatttttgtatttttagtagagatggggtttcaccatgttggccaggctggtcttgaactactgacctcaagtgatccacccacctcagcctcccaaagtgctggcattacaggcatgagccatcacgcctggccctcctttgcacactttgcatggccaggtgtttggctgggcaagtacacaagatatgccatcccccaagtgatgagacaggcccagttttccatagctctagcccacggttttgaacacttgaattgttcaaggatgttgttaaaagctgggagtgaccttcatgctgttttgacagttggtgtggcccaggcacccaccaatcagcctaggctcctgctgtagccacggcagggccttctcagtgtgcacctgctgtgtggcgtcccagtagatacacctcctgaaattgagcccacctgtgccagacaccatgcttataggcacttcacagatgtccccttgttgaatcctgccacactccgcctcacattgtacagtagaaaacacaggggcccagaaaggctgtgcaacttggcccagaggatgcagctagccagcagaggagccaggatctgaagcctagccttggcagccctaaagcccatgccagcagaatatccgatgcggtttccaagactgtctcaggcacctccagggtgtcgcagagacccgggccccgatctggatcctggttggaggcagcccatgaagtatgtttctccttccaacgtgcgtggctgctctagggcccaagtgaaaagtcacgggcccactcgtgaaggcctgctaacatgtacaaccccagccagcagaaggctgggtggtgtgaacccctgggggaggaaggcctggtgctttcctaaaatcagcagcaaagtggaccccagggagcccacgtgggttcatcccacatgaggcagtgaaaccagctgatgctcagttgggttttccgccttcagcctgcgtccagctcaggggaccttagatttcctgcctgagtttgaaaactctccacatttatcccaaacacgttctcaccttcccgtggggacctcagcctggctcccaggatttaggctcaggctgtcctcttggttttgtggacttgagacctgatccaagagatctctccacccgcccggcccacacgtggccttccaacctcttagtggctcatctccctgcatcttatcttccctgggtttgggcaccccactccctgtctcagtgaattattgttttccaagcaagcaggattaggataagtccctactgtgcacagcattcgggatacaatgtggcaaaaagcatgatcttgcaggcaggcggggtggctgaggcctatcaggtggccacccagaggcatgtgcagttacaaaccgtgacaaaggaaaggtgcagcaggttctgacagccgatgcagaacagtgcgggaggctcccagaggtggcatcgctgcagatgacagccgggggatgaggggttggtgaggccctggtccgtgaggaaggtggcctttgggtctcacatgaggccaccagggtcccaaaccacatctcctagagaccagtggattccttttgcccatctccctggggtctgcctgtacattctgtcttcccaaatgcagacgggccgtgggcaggggggaggacacttttgaggaacattccccatgcccatcagggccgcggcctatagcccagcggtagcttcaggcccagtacaagtgagggcctctcagctggaagggggaaggggacagccccgaggggtcactgactccctggtcacccagaggctccctccgtgtgcagcacctgcctctgagcctccttcgcacgccagaggcagagctatgggtgccctggagtggctctttcagtgctggccccagaccaaagggagagtcaacaccgaactccctgatgacccgagcaactgtgccccagggcactttaatggccagtccttttgagaagtgtggtgagatcctccagtgctctgtggggagagcccgacaccctccccacgaagtgtccaggagccaggcatcttgtcgcccacacatccagcagagctatcctggcaggcctcagccagcccctagtgagaaaattgcagggttggaatcagcattttttccccttaaacattttatggttttgagaagctgaacttgcaaagaatatacagcgggaaagtgaaaaaagacccaattttagaaccacatgtggggccacaggaaaacgttagaaatatcttctggtataccactgtgcacccacacagtgacacttctgcatacacacagtcacacatgccaatgcgcatgttcatacagccacacatacaaatgtgcatgcatagtcacactcccacacagtcacacacatgccagggcacatacacactcacacatacaagtgtgcatgcatagtcacactcccacacatacacaatcacacacataccagggcatacacacactcacacttacaaatgtgcatgcatagtcacactcccacacacatacatgcacacagtcacacacatgccactgacatgctcacatacacaaatttgcatgcatagtcacacacacatacacagtcacacatgccactggcatgctcacacagtcacacatatacaaatggacttacatagtcacacttacatacacaggccattcacatacatgcacacactcatacagtcacacgcatacaaatgtatgtacgtggtcacacacacatacctgcacctacacatacacactcacacatagatgcacacagtcacatacacacacacactctgagggagatgccgataggaaaaccatctcctcagataagaactctgacctacagtgagttccttaaatagcccactcacacctctgagctccagattagttggagttcacatacattccaagtgaactaccttggggaagacagaaaactgtttgatcaaaaatgaggacagtgtgaatgtcagcctgcttatttatttatttttaatttgggggagcacatagtaggtgtaattaaacattcatttttaaaaaacaaaaaaaaaaaaaaaaggccaaagaggcctagctttttttttttttttataaaacacatcacaattttattgcttgaagaatacagcatatgaaatcacaagaatgtcaaaatgaaaagtcactaggcttcaaacgtttaatacattatcagatgcagtaaaatattaacctgaactctgcatcaaaaaaaaaaaaaaaaggtgtggaaaatatctaagttgtttacttaagaaacagatatccttaaaatagaaagtataaggatgttccagtccaaattagaaaagccaacacgtattaacttatcgttctagactagactacctttggtacttaaactttttaaaaaacaatttcttctatctcatccaaatgcacttcatgggtatgacatccatgaagtaacttcaacttaaaacattcagcaaaattaaccttttcacttcatgggggaagtatatttaataaatgtataacaatatttcccttttactaaaactgcaaaatatgatcattaagaaacctaacagttataaaactttacttacttagctctccaattaaaattggaatcctgggagccacaatctatttttgggcttggtgaatacataagtttaaaagatttggcaactgacataggaatttaattacttaatactatcttaagtgacttttcctttctgtttccaaaatatagacattatgccatttcttcaacatcctggattcctataatcactaccatactgtatttattagaaccaaattaaagcttctctaacaagcaggtagaaactatttatgttccatatacggctgataagttataacacaacttatgtttcatatagggctgatcagttaattcatatagggctgatcagttgtaacataacttcttaagcaaaactaatcttttttttaaagctatcactcaattatggagacaataatgtcatctcaaaaggtaatgttggactctaggccatctagttgggaaaatgtaaaagtaattctaaaaacaataagtaaactataactacaagttaaattaaaaatccctctctcatagcaagcatgctcattaactttcatttctttcccccagcaaaggtttgaatattcataaacctcagttaaaccaagagaaccaatgtaattgtttcaaaagtaccacctatatatttgaataatatgagtatggatggactaggtaagtaatactatcaacaattactgaattggagtgaaagagtaaaaatcatgacagacttccaaactgggcagtttttgaaatgtcatagtggagctcaaaatgaattatgctgtaataaaactatagtttttacctctacacaaaccagaaacaaaataaaaaaacataaccaccaaatttatacaaatactattaaacatactccttcctagtttttgaatgtcttgaagtttttctaaacaagtatattgatctgagcatatatatttattgcctatatatgtactcattttaaaagacaaattcagatactacagaactgaactctttcaccaacccaatccaatgtctactgattcacacagcacccccccccccttaataatttaaaattcacaagttttagtttagttaaaagggcagaggaaatgcaaatgcagatttagagctttgtagaaatttcactgtatttttataaacttgaagttatctgtaacactgtttattgatcaaacgaaggactcgctgctatctaaaatttcataaacaccattaaaaattcaaaattgatattatactgaaccttaaattttcaatagttcaaagagacagtttttacatgtatagcacacaatagatgaaacttaatagcagacatccctagaataccaatgacaagtccaccaagatgcatacaaaattacagataagcatttctttcactgtttttgttgtgcagggaaaaacatttatagaagaaatagaaactcagctggtgaatttcagatatcatcatcatcttcttcatcctgagaagatcccgcctgattagatgcactggctgaggcagcagcaagctgggcttgttgggcagcttgctgcatttgaagccattcctgttgggccaattctgcttgttgctgtctagcttttgcaaataattcttgttgctgtctcaataactcttcttcaggaatgccaaggttttccaaacgagaactggcctttcttctttttaatgctactgttttacactcttgcaagacttcttttacttcactgatgtaagagccaaatcccaaactttctagtgcttgtatgacatgctctggtgagatggtcttcttttccgatttgttacaaatctcattggcttcagaagatataaggtgaatgaattcagtgcagcagttcaccaccagctctcgagcatcgttggccacccggacattaggaagagtctctttgatcattttattgatagcagctctggggatagtgagatcatcatcgttgccagacgaggaagccatagtaccttcctgtttctcgcgccccggcttttaaaaactccccagctctggtccactactccaccgagatttctcaaaaagtcgccctcggagagtgatcccggggggtgctttgcgaagaaggtgcagaaaatgaacggaggagcagctggcttgagggctgggaacactcgcgtgtgtgagagatttaggatgagtttgggaagaaagtgggggcccgaggattctagagagagcacagcccaggctgaggaggggaaagcgcggtggtccggaaatttgagcggctggggaaccaccttcgtgtctcctcagaggggcgggcgctgtcgcctaactggtccccaacggcgtcggagcagaggcaagatccaggggcactggcctcgccgcggtaccgggcgggtacccagcgggctcggctctatagagcccgaggccccgctgccgctgccgccgccgccagcagccgttgccgccgcctcggccaaaccatccttcagacacccgcgccgccgcctcacaacatgtccgccgctgccgctgccgctgccgctgctggaacggcgacggccgcctgggaactaatatggacagagccaggcacagtgggagtcgcagtggctgccgcc

SEQ ID NO: 502 - DNA, 1837 bp, Homo sapiens
gaaaaaactaccaaaccaaaggttactatttttgaaacatcgtgtgttcattccagcaaggcagaagactgcaccttctttccagtgacatgctgtgtcattttttttaagtcctcttaatttttagacacatttttggtttatgttttaacaatgtatgcctaaccagtcatcttgtctgcaccaatgcaaaggtttctgagaggagtattctctatccctgtggatatgaagacactggcatttcatctattttctccctattcctttttaaaggatttaactttggaatcttccaaaggaagtttggccaatgccagatccccaggaatttggggggttttctttcttttcaactgaaattgtatctgattcctactgttcatgttagtgatcatctaatcacagagccaaacacttttctcccctgtgtggaaaagtaggtatgctttacaataaaatctgtcttttctggtagaaacctgagccactgaaaataaaagagacaactagaagcacagtagagtcccagactgagatctacctttgagaggctttgaaagtaatccctggggtttggattattttcacaagggttatgccgttttattcaagtttgttgctccgttttgcacctctgcaataaaagcaaaatgacaaccagtacataaggggttagcttgacaaagtagacttccttgtgttaatttttaagtttttttttccttaactatatctgtctacaggcagatacagatagttgtatgaaaatctgcttgcctgtaaaatttgcatttataaatgtgttgccgatggatcacttgggcctgtacacataccaattagcgtgaccacttccatcttaaaaacaaacctaaaaaacaaaatttattatatatatatatatatatatataaaggactgtgggttgtatacaaactattgcaaacacttgtgcaaatctgtcttgatataaaggaaaagcaaaatctgtataacattattactacttgaatgcctctgtgactgatttttttttttcattttaaatataaacttttttgtgaaaagtatgctcaatggtttttttccctttccccattcccttgtaaatacattttggtctatgtgacttggtttggaaatagttaactggtactggaatttgcattaaataaaaagtaggttagcctggaaatgaaattaaaattcacaagtgtgtggctttatttcagtacccaccctcttcttcaccctactattttgccgctgcaatatgtagtcacatcaccatttccattcctctaattagggaaacattaatctttgttatacagaacaagatatcaataccacttcttgttctttccaatgattttattccattgtgtagccccaagaggtgcagcttccaccttggaaacctttggatttgatgtagaggaagctttgcagacactgcttagaaaagaaagaaaacaactctgaaagggacagtttttaaatgtgtataagctgctgtctttgattactgtgttcatgatttggtgtggctgtattttcttttaactttcatcctattagtaatggtctttgggggtctctgtaaaatatatggacaccacgaacagtggggctgtacctcccaggtaaccaacacatgttgtgtttgagtctgctcatttccaatactggatgatgtatgtaaacatgttatgtctcttagtgcaaaaagaaacatcatttttttagggctggctcactctgtcaggcctaatctaaaggctagatataaggtcatgtgactgctgcttcaataaaaacaaatttatattcg

SEQ ID NO: 503 - DNA, 435 bp, Homo sapiens
ctgaggaaagttccctcctcttcatcgggttccccagtcctgggaagacagaggcagagggatttcgggatggaaagggggagaggctgcccttctaggaaccccccagtacaagcctcctttcccagattggtgtaactaggcccagatatggacgaagagcaggctcggggtccgctagaaatgaggagcacccaggagcagcttatgtgctggcagggggcttctaagctggttaacatttccccatctgtaaagcagggatagcagtactgcccatctcacagggtggctgtgaaggctgagtgagtataaacattactactatttcatcttagctaacaagtgtcatttacttatgtttcttatttagtggacagaatctatccaaatgactaaaatttagtccagattaaaacaaccaattatccatct

SEQ ID NO: 504 - DNA, 937 bp, Homo sapiens
cttgtttgtctagctccttgagatgtgaccttagattgtctatttgtgctctttcagactttgtgacgtaggcatttaatgccatgaatgttcttcttagcaccacctttgctgtatccgcactgcctttgctgtatcccagaggtttgataggtcgtgtcactattattcagttcaaataatttttaatttccatcttgatttcattgttgacccaatgatcatttgggagcaggctatttaattcccatgtatttgcagggtttcaagggtttcttttggagttgatttccagttttattccactgtggtctgagagagtacttgccataattacgattttcttatatttgttgagacttgttttgtggcccgttgtatggtctatcttggagaagttccatgtgcttatgagtagaatgtatattctgcagttgtgagtagaatgttctgtaaatatctgttaagtccatttgttctagggtatagtttaagtctgttgtttctttgttgactttctgtcttaatgacctgtctagtgctgtcagtggagtattgaagtcccccactattatcgtgttgctgtctatttcatttcttaggtctagaagcaggcgcagcccagcctcgaaatgcagaacgacgccggcgagttcgtggacctgtacgtgccgcggaaaatgctccgctagcaatcgcatcatcggtgccaaggaccacgcatccatccagatgaacgtggccgaggttgacaaggtcacaggcaggtttaatggccagtttaaaacttatgctatctgcggggccatcgtaggatgggtgagtcagatgattccattctccgattggccaaggccgatggcatcgtctcaaagaacttttgactggagagaatcacagatgtggaatatttgtcataaataaataatgaaaacct

SEQ ID NO: 505 - DNA, 476 bp, Homo sapiens
agagatgtggctgtggctttttgggaggtggggcatgggaggaccagagacgaagggcttggaaggagacccccacatgcatcatttcctcctcttcacagtgtgctgggagtccagccgtgcactgtgccagatgcctcaggaggagaaccctccccagtgtactgtgaaggatgacacagcacttcttcctaatgacacgcgaccgtcctggtgcctctacatggttgatgcgggcagtgtgggaccctcagttctaggactggtccgcagagaaagcacccaggagcagagcgcttcggagcggtcctcagtggcgccacctgctggtgctaatagggacagccacaggcctcttgcagactggcccaccctgcctacttccctactgacaagttctttggtatttcaaaagggagaaaccactataaaagacaagaggaagggcaggtactaggtgtttcatttccagaatt

SEQ ID NO: 506 - DNA, 1073 bp, Homo sapiens
ctttattgctgtcaacaaagatattattcccatttctcagacaaggaaactgagatgttttgagataagcagctttcctgagaaatgacattagttatcaaagcctggctccaaggccaggttatttggatccaagtgcctgacatataataacttaatatttattgaataagttatcaactctgagtaactatatggttagtataacattcaacaaatagttctaaattatcaaataatatgaggaagaaaagcagagtcaagagaaatctgcacatattccagatctctctttccccctcacccttcttactggttataggcaatgtgtttaatatgttcttttccctcttctgccctccaccagagggtgctcataagcaactaaatggcataaagctgtagtgataggaactgtgaaagaagggctattttaattcacagtgtggattattggcctctgtgaaaaaaaaaaaaagttgactttgaaacagagttcttgattgagctgaaataactttggtttaaagttgccttacaaataacatcttgagcacttacttacctgaggatagtacttttttatataggtaaagttgaccattctctctaaaaaggtatgagggactatgccattagacagtgttaggctggtctgggttgtatttcttattgtgtaacttaatgctcttcagaagtattttaatgacgtaaaatacttcagaacctcttctagtgtactcactaaaatcaataagtaatgaagtacaagaatattgatgtctgtgtttagttataaaagcatatccatttagaaattgtgctaattctgttacagtgagcagctctttatctcgctatgacataatctggttttaggggatgaaatgccctagaagattaaaaaaacaaacaaacaaaaaaaccttttatattgagcaacctctgtttgatagccaaaatctcaagataatgttgggacagtataaggaagcataaaagtgggtaattataatgtggaaaatagcatcaggtgattctccttgattttgagagtcccaccagattaaatg

SEQ ID NO: 507 - DNA, 857 bp, Homo sapiens
aattcatttacttttaacagagatacaaagcactgtcttgtttctaatccaatttttcaatttttcagattttatatttgcttaaacaataaataaaactcagaaaaccaaatagtttttgttttcaaagctatccaggaaaaataaaagatgtctaacaggaaatcatacaagtccttgaagaatactgagtatattatttgctattttactcaaatgttattaatttttactactacaaactacttatttagtactacacggcatttactatttggccttttgaaggagttataaattccaaaacactataatataatttttggacaagtatacatttctgtttaaaagaaatgtatgcttttattttgtatattttatattttaaatgtatacatttattttgcacattgttaatgttaaatttggtagtcctggatctgctgcatctataaaatggagatttctttaaaaaatcgtctaaaaattagcaatatttttattttgagagaaattgtgcttagctatttaagttaagattcctcaagtttgtgatatttgtatgtgtggggatcaaagaggaaaatatatagtaatttgtttcatcaaaatgacgtattcaatattctataacttctagtcaaactttcaaatgaaagtttgaaagaagtaaactaatgttttaattacatatagcaaaggaatgatcagtaaataaaataactagggttttcacatttgcaatagaatgactggattaggcaagagattaaatttagaaatttgaattacagaaaagcattggtttaaataaatcctcaaaaaagtaatcccaggtcaaaatatgatgtgaaatt

SEQ ID NO: 508 - DNA, 569 bp, Homo sapiens
agagtttaaaaaaaaagagcctagagaggttgatggtagtaaccaaagtcacacagctgtgaagcccaggtcttttacaatggcccacatggccatagcacccatagctgctgtctccctcttctgggtgagggcacccttgggctgtactaggaattgaatcttcatctctattaactcttgtattgctatgttcatttctatatgtaaatatcttgcctatgtaaccagaccagtagatggaggctggaaaagcaagttatacccaagtcctctgggaatccttatcagaatatccatgcctgcctgttctccccaagcccatctcactctcctcgtggctgccgccctgtgccatttgacagttcttccccaacttgtcctgatttctttcctctcgggccctgtgagagccactgagcaacacagacagaatggctttagagacacagaaaactattagtagtggtcgcctcttgggtggggaaccagatggcggggaggggcttttcaccttttctcttttgaccttttgacatttaaaccatgtgaatagattgcccagttcc

SEQ ID NO: 509 - DNA, 586 bp, Homo sapiens
tggggaaagagttctaaagtgtctccagctgtgaacccaggaggtcaagtgggctattaaaatctaacgttgagtaaatgtgatagtgatgagaaaggatttttgtgtactgtaaccttgcagtagagatgcagctgtccttcgtgtgtggaaacacacgtctcctttacatagttgggaacctcattagaaatgacctcagctgccccatatctacgttcctttcagcagttgtccaagtaggagtgtatccagtgaagacatatcaaatcacaaagtcattgtcattagagtgtacttgattactgggcatccttgtaatataatttcataccactgacacattatacttgtaagagaacatctttcccagagtgcctcagaccttattgctttaaaatataataatgttttcattacttttattatttgaatgatttagtaaagttgactgaatctggtatagactttgggagtatgtgtgtgaagtttttatcaaactgtaatatttgtgaatggaatgccttgcaatatgaatgttaatataatgtgtaaagggagattaaaaagtttgaatgattatcct

SEQ ID NO: 510 - DNA, 2399 bp, Homo sapiens
  misc_feature 2384,2390: n = a,c,g, or t
ttttttttttttacaagtgttctaagagctttactgactgaagaccacagggagtgatgaaaatctcagggaagggatgccatgtggacactggtgaccacaaagaacactctcccattatcttagcatcatggcaactcagctaatcctagttcaaatgtccctcttcccagacgcccctcatgacccctcctcactgggagggatgcaccccagctccgtctcccacttcagagccttctgtactctgctgactctgtccagaatcccagctatttgggttcaagcatcccagtgacctggctctatacgtcttaatgtggtatttctgatgtaggaacagtattttctaaaatgggaacagacacctagctcacacctcctcactgcttctcactactcacttggccacaccattctctgctcagtgccccatggaagagacgtgattgcagaaagcagataacaaaggcatgttttcctggcttttgggtttcaaaagcctaggtcctgaagggaacagaaaaggcttaaggcatagataaaagattcaggagaggccaggcgcggtggctcacaactgtaatcccagcactttgggaggccgaggcgggtggatcacctgaggccgggagtttgagagcagcctgaccaacatggagaaaccccatctctactaaaaatacaaaaattagctgggcttggtggtgcacacctctaatcccagctactcgggaggctgagacaggagaatcacttgaacccgggaggcagaggttgcagtgagctgagatcgcaccattgcattccagcctgggcaacaagagcaaaactccgtctcaaaaaaaaaaagattcaggagaaaacattaagtaaggcttcctcacctccaatattaacgaaagggggaaagaagagagaggaggagaggatgtagtgagaatactgacacagagggtcccaaaaggaagagtccctgagctccacaccccaggccaagatagatttgcagttttaacagatgcagcaactcatgccttgtctgtcaaaacccagagcagaaacagcttcaaggtgtgtctgcatagccaaggccttagacaactttacgggtctccacatatggcccagaagtggcagagagaaccttaggactgagagagtaatgcaaatgggaacaagaaatctctctgcatcccagatgaactgtctggacctctgactggggaccagatggaatgatggaaatcccgggatggatgaaatatggacctggtgatcagtgagaatgctcttccaacttctttggcattatgtaagaacctcagaactcaactatgaccctcatgggaaagagaaggaattccaaatggaccaaatgatcattttttggcactcaggaaaaatgggggctcaaaacaggaagtacattcttgagatatttcttgcacacctaagacgtgtacctgctattccaatttcctggggacctcggctttccttatgtgttgcgtgtgggatcataagaaaagtctgtctcagtgatctgaatcatctcagcatgcgtatacatcataaacacacacacacacacacacacacccctcagatactgcaaatcgggctcaataggaattggggaataggcattagaaactgtttagaaatgaatgcagggcccagatgaacgggatcagactgtgtacagggtgtgacaaaagcctccggcagtagctcccatcagccctgctgattccctgaggggccctctttccccacttccccacacccctgaccccagggggaaaaaaggcagcacagaaccattctgaaccaatcaatcactggagacacacagactccacctgtatcaaacgaggataccagccacccagacagccccagtcccagctccatccatcctgcaatccctcctccacagcacagcacagcccagacgctgcctctgggaaggaagcctgaggccagagttgctgagcctctgggaaaatctggaaatttggtttccccaagatagactccacctcctctggaaagatgctgtgctcctgacagggctttgtctccctgggaaggaatccatgtcttgggaaggctctgcatcccaggaaaggctccacacctgcaggaggcactccttggtcctgacggactctgtgcctgcataggctccagtccttaagaaggactccatgatgcagggggactccaggccctcaggaagttctccatgtcctgggaagggctccaggtccctggaagagttttgtgtccttgagaaagaccccatgtcctcaagaaatacagcctgcctccttctaagacgcgctccacacccccagaaacaactctaagaactttcnccaccntccagccca

SEQ ID NO: 511 - DNA, 1061 bp, Homo sapiens
  misc_feature 1053: n = a,c,g, or t
gaacaaaattagatgttgacattgctattttaggctgtgtgttttccatatgcttcttgctttccctgtcacaggtggtggcagcaatattggtgtgattgaggttatgctggcaccactcgcacacaggcgcacaatggtgttagctgggcagaaagagtggcatctctggctaccgggctgggggcgacctttaccataggatgaagtaaccttgcattcggctgcaaggtgtactgtacgtacacaggtgctggtcgatgtccactttctgcttttctttctttctttttttcttttttaaagtaatttcccccacagtaaaatacactgactcctgagtaaattgattttccagttttatggaattgggagtctgacaagtgaaaccaatttaatgtaaagtatttggctttcaaatggtttctctgtgctattttttggaattctttcagattccagagatatcttacgtctttgattcaatttaaaatttgtacttattttcttttagaaataatgtattgtgtctgtgcagaaaaaaaaaaaccaaaaaggattgctttactccaagaggagagattgtcttaggataaacctccaagctcacatttaatataacagactgaagtaaacattagaatcctgtttagagctattctgcacagttaactactgatctttagaatctaaaattgtatatgaacttattcttaaataattgaaccgttttatattcaaatgacttatgatcgtggttagtttgggaaaaataagatggttaaattttgatttattgaaatgtaattgtattattttcataaaatagcattttcattttgtaatgtggtttaacatccttgttgtttgccaaagaaatttcatttggctgtgaatattctatttgcttgcagtatctgtttctcttcctaggctcaagttggtgacccaagcctattgtaaacaagtgattatctcaaagggagatgccaatggagtaacaatttgttaaccttacgttttctgtctgtatatttttttaaaaatctggtngtttctgg

SEQ ID NO: 512 - DNA, 836 bp, Homo sapiens
  misc_feature 773,774: n = a,c,g, or t
ggagaccatctagctggctgcccccgacagtgagtgtgttggctcttgtgaagcggggggcacctcccgagatgccttctcctcaggagcttgaggcctcagcacccaggatggtgcaaacccatagggcagtgcgggctctctgtgatcacactgctgcaagacctgaccagttgagcttccggcgtggggaagtgctgcgtgtcatcaccacagtggatgaggactggctccgctgtgggcgggatggcatggagggtctggtgcctgtggggtatacctcccttgttctgtagccctgggaccctttcctgcgtatgtgtctccttcctgtcacctgggaatggaatggccagtgaacaccatcccagaagcattttccctctgcaaaatgacgtttcttcccacgtctgtttctgctaatatttaaaataaactttccttcttccctcctatacccacctgtaagtgaaatctgctcttcttccaaatatataaaaaaggaattgccctccaggtaatccctttcctttttcccgtctatataagggaatgtcttccttcctatctatctgcaaaatggaaatctagacctccttcttcatccataagtggactgtgccagtacaatacatgcctcagcccccaagcctagaaggacctccagtctccttcctgtgtggaatcttccccactccatccctcccaagttgcctgtattgataatgtactcactcatgctgtactaggtgctgaagcctggacacccttgnngggtgggcctgtgttgatggtttgcatccttcctcctttgtcccaataaagtatgggagttg

SEQ ID NO: 513 - DNA, 1087 bp, Homo sapiens
aaaaaaagtaacaattagaaaatttcctgtgattcttttaaattgtaggactcttgaagactgtctaatgtttgtatatagatcctggaacaaagtaacatcttttttttttttttttccccaaagtaacatcttttttaaagaacacagttcattcatggttcatggtgggtttttctctgttttaagtctgaagagacaaaaagtgttttacatatactctataaatagtgattaggaattaaagttgttttctgagtgaaactaagagttgagaggacagtactcttaaaatatctccccatatgttgatgaatctcacccctcggcatcatattctagaaggattgagctgggtattgaaaggtgaagagtgaggtttggctttaattttcagtgacccagatgctaaaagaccacagatggaagccgtagtattagatcaggacctcactaggctgtgcagtaaccatcatgttttgtttgcaacagataattcgtgtccagtccccagatggagtgaagcgatcacagcaacaaagagagaaacagcagcaacatttttgaaaaaggtatctgtggcctgggtattgaccctcaggatatttttcatcctctactcttactgccatcgataccttttctcttttcctcgttttcttattttccctattcccaaattgcctcttgcattgcctttctctatcacagttgggttggattgctataggatgagatgtttgtcacagctgatcactgctcaaaattataggaccaagagcccaaaggtaagtgtaaaaatatttcacggctgggcgtggtggctcacacctgtaatcccagcacttcgggagaccaaggcgggtgggtcacgaggtgaggagttcaggaccagcctggccgggatggtgaagccccgtctactagaaatacaaaaattagtcgggcgtggtggtaggtgcctgtaatcccggctgcttgggaagctggggcaagagaattgcttgactcagagaggcagagtttacagtgagtcgaggtggcgccactgcactccaacctgggcaacagagtgagactccatctc

SEQ ID NO: 514 - DNA, 1116 bp, Homo sapiens
ctcaacatggcagctgcctatcctttctagtattctggtgatactacagccattgagagagagaatagcagcaatattaaaggcagaaaaggatcttagtttgttttggcacgtgttctatttttattagcttatgagttgctctaggacgtaatgcagtaactaagcttgatttagtttggtcactttggagtgaaaaagcagttacttttctgcttggtcattaagggaaaatacgaatctcttttgatgttgtcccctgaaatttaagttatatcaccttttttgccttgtatttcatggcctgtgtttacagcagtccattttttttttcactgataatattatacttaaccatctgcaagactttaaatgaaataaatattcccttccaaaagcaggtatttcattatggttaatgatacatgtattagttttataacaattagggagataacaagcaaaattaagtcattgaagtttagaaagataaatgttaaaaattagagggatactctttggctgaccaaggagggcccataggtttgttcctcatattagatgtaaatgtgagccacagttttacaggcttagaagctagtgtaactagaggtaggtcatgttcaaggattctttctggctcatgctaaccagatgagagagactgattaattcacttgttcactcaatacatatttattgaggccttgtgttgcaggacctagttctaggtgatcaagagtaagggtttgactgcatgtgagagagactggaaaaaaaaaaaacaaacagtagcttatttatttcttttattatactttaagttctagggtacatgcgcacaacatggcacatgtatacctatataacaaacctgcgcattgtgcacatgtaccctagaacttcaagtataatttaaaaataataataataataaaaatacaaaaatttgctgggtatggtggcttgcacctgtagtcccagcaactcgggaggttgaggcaagagaatcgcttgaacctgggaggccgaggttgcagtaagctgagatcacaccactgcactccagcctgggccatagagcaagactaaaaaaaaaaaaaaaagaagaaaaag

SEQ ID NO: 515 - DNA, 2082 bp, Homo sapiens
  misc_feature 1658,1921: n = a,c,g, or t
ttttttttttttttttttcaataggtatcttctttttttattccagataactacttccactcacaatgagatgaattgtctttttacagaatttagggattccaagttgcctggttttaatataatacatattcacaaaatttacacagctcatgcataccataacttatacagagaacagtttagcagtctgcttaaaatgttaaaaaaaaaatcataaaaagccattgttctgttacacataatctgtactgaagtcataagcatcatcctcttcaatgattttatccaagataaaagaccttgtagactgttcacctgctgtagtctcctcagacagtgcctcccctgtctcttctgcagcaaacatgcctgagctgttttcatcaacttcttcatcaacagtttcctggtcactgtctttgtcatctccctctcctcctgcttcctttctttccgttttggcaattcttcagttatgtcctttcttcaattatcccatttgtcagaccggaagactggaaaaggatgctatgggccaaatgagggcccttgatggctcttatgctctgtgcattgttcttttccagttcttccagattgaagccgctttttcatgtctaccacaatactctcattaaaatatggaggaggagtccaagatgtagggggatggcaatagtaagctaatgaggcactgatattaaaaataagatgtgtcaaaagatggtttatttttttggtcaccaaaatgccaacagaaaagaaagcgtaccctgtccactcagaccacagcagtttggcagcactttcaacatttgggattccacctttttggtgcatacctcttctctgagcaagcacagtaaaaaattccagagaattcctgtagcctgggacagtatatttcagtactacctgtcgagcatcagcgtgggaaaggatggcattggcagcttccatcggttttactacttcaatacttgctggacttcgcagagcaagcgcagaggaggaattaagtggagatacgatgaagctcggactatctatgattgtgatctgtttgtccaaggggacaacttgcatgctccttgtaagccccatggatacaccaacattacacatctgttcttgttttaagctattgataatgctgcttttccccacatttgggaaaccaattactccaacccgaatggctttgctgcaagtttcctgaaaacctccaagaagtttccaaaggccctctttcccaaagcagacttcacttctgaatggagcagcattcttctttgccttcacacgctaaaattccaaatagttgaattattctggcaacttacctgataaatttcaacaaaccccaagcaatcaggctccagagcccagctcttaagataactacattgcctttcagatgatctctggctgaaatcagagttggatcttgtaatttttcattcacttaaatcaagattttgtacactcatcatatttcaaccaaaatctgaaagaatcacatttcttaccactaataaaggataccttggttatcttccctttatcctttggttttgttgaggctctgaacaccactgttggcaattctttcttcaaataatttagccagctctccaaattctcctttggtaccngaccggatttatttaatataagtaccagctttttctgtccactctggacaatggcctcttctacctgaggacatctgcaaccaagaggatctctggcatccaacacctctaggacaacatcggaggcttcaatcacctttttaagttcttggcagtacagcttctttgaattctgtttgcccgacttggctttgttctcagttttgcaaagcccaaactccttttccataggttccacatttgatggcttaatatcaggattngtttcaagttttcttttcttttctagtcccttctgcctgtcaagtttctgctgctgttttagttcttcaagcctctgtttccttagctcagcttccctaagaagagcctccttaaagggagcactgtttggaactcctgggtcttgattgaattctagact

SEQ ID NO: 516 - DNA, 578 bp, Homo sapiens
ccccctctcccccaaacacaaacaagcacttctccagtatggtgccaggacaggtgtcccttcagtcctctggttatgacctcaagtcctacttgggccctgcagcccagcctgtgttgtaacctctgcgtcctcaagaccacacctggaagattcttcttccctttgaaggagaatcatcattgttgctttatcacttctaagacattttgtacggcacggacaagttaaacagaatgtgcttccctccctggggtctcacacgctcccacgagaatgccacaggggccgtgcgctgggcaggcttctctgtagaaccccaggggcttcggcccagaccacagcgtcttgccctgagcctagagcagggagtcccgaacttctgcattcacagaccacctccacaattgttataaccaaaggcctcctgttctgttatttcacttaaatcaacatgctattttgttttcactcacttctgactttagccccgtgctgagccgtgtatccatgcagtcatgttcacgtgctagttacgtttttcttcttacacatgaaaataaatgcataagtgttag

SEQ ID NO: 517 - DNA, 486 bp, Homo sapiens
gacgaatgtttcacatacagttggagagagtgtgcgttctgaagttgttgctgattattttctctaagtgtcaattcagtttagttcgtagtgtcatttgaatctcctgtatacctttttctttttgtctacttgttgtattactgagaacagcatgttaaaatctccagctattattgtagattttctatttttccctttggttttactagtttttgttcatatattttggcattctgttatcagatgtgtatatgtttgtaattgttgtctcttcctattgtattgagcaggaactatcctttttgtcttataatactcattctattgaagaatattttgtgtgctattaatacagctactacaggccatgtgcagtgtggctcgtgcctgtaatcccagccctttgggaggccaaggcgggaggattgcttgaggccaggagtttgagaccagcctgggcaacacagtgagactcccatctct

SEQ ID NO: 518 - DNA, 1433 bp, Homo sapiens
attagggtgttaaaaactggaattgaatttgtacaaaaagagaatatatttatcactaattattttcttaatgtaggaatgtaccgttaaaaaggaccaaaagtttttggtctgggtcaaaaaatacgaatgtgttctcaggctcgtggtccctcttattttcttctggaaacacgaggttgcatttacatgcattgctccctctttcatgtccactgaaaactcactctctcagggctaattgatttactgttggctttttattatttgcctttgaagtcaaaaggcaccagtatcccaagcttttttttcccattcgaatcctgtcttgtcttcaagaaaggtctgggggtctttgtattgtgacccaggccacagctgcccgccccccgcccccgacccaccccgccctgcccctgcattatgttttctgggaggtttgaaagaggccccctggagcatattgatttcccaataaatgtaagatttgggcacttgcagaggggtccagaagagaaagggttggaggcctccacacctgtgggcaccgctcctgtcctctccactgtgtcttgccttctcagtttccttctcctctgcagtgactgtgccgccctctgtggtctccccaggaccagtgttgaggcaccacttcagtagatccccccagatccttggaaggtctgagtggccacgagagggtggtgagagttggcaaggtgggccttcctgcagggaccacggggggtcagcatccttgcctccgttctagacacaggtgaatgtcagtgggcacccacactggcggagactccagtgtgagggcaaggaggagcctagtgagactggatcctctgcaggtggaaaaataggaccttctcagagttggctgtcacatacaaattaacagggactgtgggtgacgtttctaacaataataattaaaaaacaacaaccctgcagcacatgtcagcctggcgttgggcaagtctgccacctttcttttatttcgatgtgtaatggttcacatgatttggatgagaaaaggagggatcaaactttatagacaaaacccagctgtgtgaaaaacaggattaatgccagtgattggggatgatcaaagagaaaccttactttttctcccccagtactcattccactaaagggcgaattggcagagttcggcatccctggggggaaagagaagtgctagaatcatgcaacgtgtgagtgacgataattccaagatcaaaacttacacacttaatctgctaactcttatggtgagggtttcttgccatagatgctatgtgggtctgtttctaagtagaatcactatattaccccagttaataaagaaacatggatttagcagatttaaggttaatattgtttaaatttaaataaccttaaaataaatctctttctcttct

SEQ ID NO: 519 - DNA, 947 bp, Homo sapiens
tgccttctcattgtgttttcaaatgttagaaggagctagctagctttctggggtctcttttgtaaaggcactaatcccagtcattagggcaaattggctcctacaggccccacctatctcctaataccatcaccttgaggattaagatttctacatatgaatgaagcaggtgttgtagaaggtcagtcagttagaccatagcaccatctgtaaaattgaatagtaatttactgcctcattggatgtcaggattaaaggagataagattttattagttactagttaccatagtggttttttttttacactataatgttcgtttttttgtttcatgcttgtaccttcaacatttccttccatttgaatacttcttttgtctcctgtaggcctgtctgtccacttaggtgtaagatgtgtttttgtgtcaggaatgatggtgcaatgctaatgttccattgccctatttggcaatactctgatcattaactataaagaataacaccagtgttaactaactctccttgcctgacagtagtgctgccactattccttgtttctgtggtaatagatgaggtttgtatggtcctgttattccagcctccagacaccattccagatcaactggtgccctctacgcccccgaagtgtatggggcctcaggtgaaggatgagtacattttcactatcatctggcattcatctcagattttatccttttcagtttccattaaataatattcatgttttaaaattgattttttattatttaaatttaatttgttggagaataaactttttttttcttttctcccaagtaacgttttcccctttagcaactgtattgagcatttttctcactggtatatggacatttttttgtactaacctgttcgtgtcatttttaaatatagaattgtttttatgttctcatctttgtatatatgttt

SEQ ID NO: 520 - DNA, 424 bp, Homo sapiens
gtccttgcgcaccggggaacaaggtcgtgaaaaaaaaggtcttggtgaggtgccgccatttcatctgtcctcattctctgcgcctttcgcagagcttccagcagcggtatgttgggccagagcatccggaggttcacaacctctgtggtccgtaggagccactatgaggagggccctgggaagaatttgccattttcagtggaaaacaagtggtcgttactagctaagatgtgtttgtactttggatctgcatttgctacacccttccttgtagtaagacaccaactgcttaaaacataaggatgtttcagttcctccatttaacagatatgaagagcattttaagaggtgcagcctctggaagtggatcaaactagaactcatatgccatactagatatgtttgtcaataaacttatgacgtg

SEQ ID NO: 521 - DNA, 1520 bp, Homo sapiens
ggccgctttttttttttttttttttttttttttttcttcttcttcttcttctccttagagggggttttgccctccttaccttcctcactgctctccttgggtccggcctcctccagccccagcccgaagaggtccgagtcattcttcagtctgaaggcggggagagggagcttggggggtgggggcggctcggcagggccctcatcctcgtcagtcacatcggaggggtcatctcgcacgggaaagtcatccgccctgcgctgtgtgtctgatccctcgctctcaaagtcggggtcatccatgacgaaggacagcatttgtgcagcaatgggtccctcggggtcactctccgacgaggaggcctgctcacccttccccggctccatctcagcagggggcctggtgctgctgcgcttctccggacctgtgcgaacagagacaccgcctggccaggggggtgctgcggtcctcgtgggagctgtccccctccgtggcttcgaagctggtatggaggaccacttggtctctggctctgagcactgctggggagctggggcagggccttttgtgggagctgccacttctgcttcctcctcactcgaaagagtgatgtcttgactggggacggggcctgcaggcagcgggggactcccacgtggctggtcttcgaggtccacatcgtcctggaaccctgccaccatcgggttgccgcccagggcctccccatcactgtcgctgtcctgctgggcagccttggcccccaccttcttctcgtccctggcgggggttgtgtcttccaggaagctgcggtccaggcggtcgtcaggaacaaagtcctccacactctggaccgttgctgggccctgtgcggccgggactggctctggaggtggaggggctgcctcggtggcaggtgacgtcccaaacagcctagagatgatgctgcgccgtggggcgggggctgaggggcacgcaggtgggggcagggcctctgagggtggtacagggggcacagaggatggtggggcagcattgaggggcagctgtggggcgggctggggtgtgccggggctggagctccccgtggacacagcgcctgcaggcaccactggtgactgggagcccggggatgggctctgcccgttggccgccagtggggacgcatggccacggctgcgagcctccatcatctccaggaagctgaaaggcagaaggcgggtgagaagcctggctcccctgcctctccctgaggccctcaggtgacagggggctctctgctgctgctgctggggctgggaagagccactgtgttctgggccacccgccccacagaggccatcatccccatccacttccaagggcagcagtgccagccaggcacggtggctcatgcctgtaatcccagcactgtaggaggccaaggcaggcagatcacgaggtcaggaggtggagaccgtcctggctaacgcagtgaaaccccgtctctactaaaaccacacctccccctgaacctgaaacat

SEQ ID NO: 522 - DNA, 2269 bp, Homo sapiens
gggcgcgggggcgcggcgtgcggcacgctgcagggctgaagcggcggcggcggtggggactgcacgtagcccggcgctcggcatggctctcctggtgctcggtctggtgagctgtaccttctttctggcagtgaatggtctgtattcctctagtgatgatgtgatcgaattaactccatcaaatttcaaccgagaagttattcagagtgatagtttgtggcttgtagaattctatgctccatggtgtggtcactgtcaaagattaacaccagaatggaagaaagcagcaactgcattaaaagatgttgtcaaagttggtgcagttgatgcagataagcatcattccctaggaggtcagtatggtgttcagggatttcctaccattaagatttttggatccaacaaaaacagaccagaagattaccaaggtggcagaactggtgaagccattgtagatgctgcgctgagtgctctgcgccagctcgtgaaggatcgcctcgggggacgaagcggaggatacagttctggaaaacaaggcagaagtgatagttcaagtaagaaggatgtgattgagctgacagacgacagctttgataagaatgttctggacagtgaagatgtttggatggttgagttctatgctccttggtgtggacactgcaaaaacctagagccagagtgggctgccgcagcttcagaagtaaaagagcagacgaaaggaagagtgaaactggcagctgtggatgctacagtcaatcaagttctggcctcccgatacgggattagaggatttcctacactcaagatatttcagaaaggcgagtctcctgtggattatgacggtgggcggacaagatccgacatcgtgtcccgggcccttgatttgttttctgataacgccccacctcctgagctgcttgagattatcaacgaggacattgccaagaggacgtgtgaggagcaccagctctgtgttgtggctgtgctgccccatatccttgatactggagctgcaggcagaaattcttatctggaagttcttctgaagttggcagacaaatacaaaaagaaaatgtgggggtggctgtggacagaagctggagcccagtctgaacttgagaccgcgttggggattggagggtttgggtaccccgccatggccgccatcaatgcacgcaagatgaaatttgctctgctaaaaggctccttcagtgagcaaggcatcaacgagtttctcagggagctctcttttgggcgtggctccacggcacctgtaggaggcggggctttccctaccatcgttgagagagagccttgggacggcagggatggcgagcttcccgtggaggatgacattgacctcagtgatgtggagcttgatgacttagggaaagatgagttgtgagagccacaacagaggcttcagaccattttcttttcttgggagccagtggatttttccagcagtgaagggacattctctacactcagatgacttctaccagggccttttaaccaagaagtagtacttattggtcatttgaaaacactgcaacagtgaacttttgcatctcaagaaaacattgaaaaattctatgaattgttgtagccggtgaattgagtcgtattctgtcacataatattttgaagaaaacttggctgtcgaaacatttttctctctgactgctgcttgaatgttcttggaggctgtttcttatgtatgggttttttttaatgtgatcccttcatttgaatattaatggctttttccattaaagaataaaatattttggacaatgccgataaatgtatgaagttagtatccacatcataaattcagagtgatgtttagcagtaaatcaatattttgaagtgatacacagatgtctttcctccccacaaacttttttaaacaaaaaacaagacctcttttctttagatggtgccacctatgcccaccacaacagagattttacatggaaaccgggctcagtgagaactgatttcctgcccaatatttgtctttgggctgtctctagtgactaattattaaggaatctagctggttatacagttcaaggctttctatgttgttaatgaacctcaaaatagccgttaagacatgaaatacagcagcaggttaccaatgcgaacaggtagttcgcatttatgtaaaacattcagaaaatgaagttttgaatttgttggaacattcaaaggacttgagagcattttattgtaacttaaaaaaataaatacaactgtcact

SEQ ID NO: 523 - DNA, 903 bp, Homo sapiens
ttttttttttttcactgtaatatttattaagtagatgacttacaagagggatattgatgaatgtaaaaattttcactcacagtgaacatgaaacctttacacatgtaaggtttagattcttttttttttttttaatctgcccctttcagattatatcatggtatatgaagcactggtgaggtctatgtcaccagaaattcccagtttgctgatttcattgagttttttaacccgatgattgtactgcaacaagtgagcatcattcactgcaaccttgaagtggtcaggttcaaccagtacttgtattttgaatggtttcccactttcaaatgggaaaaccgactgtctttcttcccttccccagttattatccagctttgtattgcaaacaatgactctcctgttgttctcattgaagcgtgggttaaagtggaaggcaacatcattccctctttggaaatctaaagcaattctgtttgcattgggcttcaccgtgcccagaattgttatcagcatgcgaggcacaccactcccccaggcaaaggcaggttataaggcacaatcagtggcccagcaggggcgccataggggccagtggcagggtaggctccggtggcacttggctgtccagaagatgggtaggccccagggccgctgggtggccctgggtagactccaggtgcaggtgctccgggataagctccaggtgctccagggtaggcgcctggaggtgcctgtccaggataagcccctgggggtgcctgcccggggtaggccccaggataggaagcccctgggtagccccctgccccagcaggctggttcccccatgcgccaggccatccttgagggtttgggtttccagacccagataacgcatcatggagcgaaaaattgtctgcc

SEQ ID NO: 524 - DNA, 490 bp, Homo sapiens
catggctctagcgcggccggtgcggctcttttccctcgtgactcggttgctcctggcgccgcgacggggcctcacggtccgcagtcccgacgaacccctgccggtggtgcgcatcccagtggctctacagcggcagttggaacagcggcagagcaggcggcggaacctcccgaggccggtgctggttcgacccggaccgctgctggtttcggcgcggcggccggagttgaaccagccggcgcgcctcacactgggccgttgggagcgcgcgccgctagcctctcaaggctggaagagtcgacgcgcgcgtgggaccacttctccatcgagcgcgcgcaacaggaggcgccagcggtgcgaaagctctcgtctaagggcagctttgctgacctgggcctggagccccgtgtgctgcacgcactacaggaggctgcgcctgaagtcgttcagcccacaaccgtgcagtctagcaccatcccctcactacttc

SEQ ID NO: 525 - DNA, 1307 bp, Homo sapiens
ctcaactaccgcaacatctggaaaaatctgcttatcctgggcttcaccaacttcattgcccatgccattcgccactgctaccagcctgtgggaggaggagggagcccatcggacttctacctgtgctctctgctggccagcggcaccgcagccctggcctgtgtcttcctgggggtcaccgtggaccgatttggccgccggggcatccttcttctctccatgacccttaccggcattgcttccctggtcctgctgggcctgtgggattatctgaacgaggctgccatcaccactttctctgtccttgggctcttctcctcccaagctgccgccatcctcagcaccctccttgctgctgaggtcatccccaccactgtccggggccgtggcctgggcctgatcatggctctaggggcgcttggaggactgagcggcccggcccagcgcctccacatgggccatggagccttcctgcagcacgtggtgctggcggcctgcgccctcctctgcattctcagcattatgctgctgccggagaccaagcgcaagctcctgcccgaggtgctccgggacggggagctgtgtcgccggccttccctgctgcggcagccaccccctacccgctgtgaccacgtcccgctgcttgccacccccaaccctgccctctgagcggcctctgagtaccctggcgggaggctggcccacacagaaaggtggcaagaagatcgggaagactgagtagggaaggcagggctgcccagaagtctcagaggcacctcacgccagccatcgcggagagctcagagggccgtccccaccctgcctcctccctgctgctttgcattcacttccttggccagagtcaggggacagggagagagctccacactgtaaccactgggtctgggctccatcctgcgcccaaagacatccacccagacctcattatttcttgctctatcattctgtttcaataaagacatttggaataaacgagcatatcatagcctggacttccctcccttctgtttgtccttctatctcttgggggaaggtttttctcagtggaatgcacaccgataacaagctcccctctccctccttgtgccctgcccccagtggtgacttacagacaactgtcaccacttactgactgcttgcactgctgccagaactggcctaagcacttgacacacttcgtatcatttaatttttacagcattgcaaggtaggtgtttggatcaattaggggttgttgttgttgttgttgttgttgtttgttgttgtaagcaataaaaactggctct

SEQ ID NO: 526 - DNA, 2010 bp, Homo sapiens
atggctgcagaaaagttgaaagaaaggtcaaaggcatctggagatgaaaatgataatattgagatagatactaacgaggagatccctgaaggctttgttgtaggaggtggagatgaacttactaacttagaaaatgaccttgatactcccgaacaaaacagtaagttggtggacttgaagctgaagaagctcctagaagttcagccacaggtggcaaattcaccctccagtgctgcccagaaagctgtaactgagagctcagagcaggacatgaaaagtggcacagaagatctccggactgaacgattacaaaaaacaacagaacgttttagaaatcctgttgtgttcagcaaagattctacagtcagaaaaactcaacttcagtctttcagccaatatattgagaatagaccagagatgaaaaggcagagatcaatacaggaagatacaaagaaaggaaatgaggagaaggcagcgataactgaaactcagaggaagccatcagaagatgaagtgcttaataaagggttcaaagacaccagtcagtatgtagtaggagaattggcagcactagagaatgagcaaaagcaaattgacacccgtgccgcgctggtggagaagcgccttcgctatctcatggacacaggaaggaacacagaagaagaagaagctatgatgcaggaatggtttatgttagttaataagaaaaatgccttaataaggagaatgaatcagctctctcttctggaaaaagaacatgatttagaacgacggtatgagctgctgaaccgggaattgagggcaatgctagccattgaagactggcagaagaccgaggcccagaagcgacgcgaacagcttctgctagatgagctggtggccctggtgaacaagcgcgatgcgctcgtcagggacctggacgcgcaggagaagcaggccgaagaagaagatgagcatttggagcgaactctggagcaaaacaaaggcaagatggccaagaaagaggagaaatgtgttcttcagtagccatcagatcagaaagaatctctcccaacattttagagtcttgcttcccaaaccagaaaaagtcagactcattgttgatttaaaacttttaacattttgtttggctggattgtactactttacctctactttaccaccaccacccttttcctccctcctttccaaataatatacagaactccaaaatagcttcatttaaggatttttttgtgagttaacaatttccttgaaatcctgtgaaatagatttgcacagacaccttgtgagtgattggtattggaggtgttcaagaaactgttcgaaaaagaacaaaaacacttccctcgttattttctctcattttttgatgagaggaaaatttgaaacattattcttgttgttgttggtaatagcataatgacagtgggaggggtacaaggggataagaaaaatgtcatgatttttttccggtcctgccacatgtaacacttactctgttacctaaattttatagttagatcatatccaatctacttattaaactgtgttctatttaccagtggagtttttctgcagtggttgcgtttcactgtaaggataatggagttcctctcctctgctttcctcagaggatggtcctttaacatagccagaaacaagccctgtggtttgaaggtgagctgtgaggatgggactaattgatatgcaccagtttacaaagacagtcttatcatccgagaatacaccatctttttctctggataattatttcttacatcatgcttgattcctacattttgttgggtctcaacattggctcacgaatgctgttaatatttattctgtattgataaaaagtctgtcttgccactacaagtaaatcccccatttaatattttcttctttagcatagcactgtcattttttgtgaaaatggttatgtttatttattacaatactgagtcatatataaattttcaataaaagcagaaactttcttacctt

SEQ ID NO: 527 - DNA, 651 bp, Homo sapiens
tgcggacaggttccgccgcctccagcgccgccgccgcagctgccgccgccgccgcctccgcctcgcctgccaccggggtttgtatgaaaacaccgggcggcgggcggcgagggatccgccgtgatccaggtgccgagccgggtgctgcggctctgcgcggtccccgccagcgccccatcctgagccgattatctgcaattatgaaatgaagtaactcaagatgagcaagttaaaagtgataccagaaaaaagccttaccaataattctaggatcgtaggactcctggctcaactggagaagatcaatgctgagccttcagaatcagacactgcccgatatgttacatcaaaaattcttcatctggctcagagtcaagaaaaaacaaggagagaaatgacagccaaaggttctacaggaatggaaattctgctgtcaacattagagaacacaaaagatcttcaaactacacttaatatcttaagcattcttgttgagctggtgtcagctggtggaggtcgaagagtgagtttcttagtcaccaaaggtggttcacaaatattgttgcagttacttatgaatgccagcaaagaatctcccccacatgaggacttaatggtacagattcattctattcttgcaaagattggacc

SEQ ID NO: 528 - DNA, 539 bp, Homo sapiens
gactaaaaagaagcgggagaatctgggcgtcgctctagagatcgatgggctagaggagaagctgtcccagtgtcggagagacctggaggccgtgaactccagactccacagccgggagctgagcccagaggccaggaggtccctggagaaggagaaaaacagcctaatgaacaaagcctccaactacgagaaggaactgaagtttcttcggcaagagaaccggaagaacatgctgctctctgtggccatctttatcctcctgacgctcgtctatgcctactggaccatgtgagcctggcacttccccacaaccagcacaggcttccacttggccccttggtcaggatcaagcaggcacttcaagcctcaataggaccaaggtgctggggtgttcccctcccaacctagtgttcaagcatggcttcctggcggcccaggccttgcctccctggcctgctggggggttccgggtctccagaaggacatggtgctggtccctcccttagcccaagggagaggcaataaagaacacaaagctg

SEQ ID NO: 529 - DNA, 661 bp, Homo sapiens
tcttctttgtccccttgtcttacctgctgatggtgactgtcatcctcctcccctatgtcagcaaggtcaccggctggtgcagagacaggctcctgggccacagggagccctcggctcacccagtggaagtcttctcgtttgacctccacgagccactcagcaaggagcgcgtggaagccttcagcgacggagtctacgccatcgtggccacgcttctcatcctggacatctgtcctgctgtgtcgcccaggctggagtatagtggctcaagctcagctcactgcaacctccgcctcccaggttcaagcaattctcctgcctcagcctcccaagtagttgggattacaagcacccaccaccatgcccagctaactttttgcatttttaatagagatgaggtttcaccaagttggccaggctggtcttgaactcctgacctcaggtgatctgcccacctcggcctcccaaagtgctgggattacaggtgtaagccaccgtgcccggccatcgtaatgtttgaatttgcttttttacatcttccatccttttggagtgtcttgttccctcgtcatagttcagcactgtgaccaccttggggttagacactatggttttatatcctgtacttgatattctcgagtccaagtctcctgatgctctt

SEQ ID NO: 530 - DNA, 363 bp, Homo sapiens
cactcataaatcaaaactatgctgagagtcactagatttatgacaaaggtgacagtgcagggggaaaatagttttttcaataaatggtgcatggtcagtttgcagatatccataaagagaaaaattaatattgatgcctaccttcatcaaacaacaacaacaaaaaatcagttccaagatggactagagattcaaatgttaaaagccaaacaataaagcttttagaagaaaacataggatactctcttcctgccttaggatagaaaaggaacttacacaagatacaaaaactgctaaccattaagtggaaaaaaaagatatactggactacatcagaattaataatttctgttcaataatttt

SEQ ID NO: 531 - DNA, 673 bp, Homo sapiens
attgtcttcggcgtttggaagggccttatttttaatggtttctatgagttaataaaatagagtttagtttacaggttcaaaataaaacagtacacctgtggaagcaggacatggtctagtgcaatcactacctccaaatgcgaactggaagaatggaagaagccttctctaagaccatgagaatacagaagctgtttatatcctttccagtcttgtaaaacttgaatggtaggggctgaattttctagctttcaaggcagaaacatggagaaacccaatgtcttcacagtctgtgagatgagcaatctgtagtatgagttcatactggaatgagagctctgaaaatatttcggtactccatactttcatttttttttttttgcacctggaaccttcatctaaggtaaagattgtgcttgagctgctgaaatccccaactgacagtgaggtcactgaggaagtatacaggttttttaaaaaattatttttgaatgtgtgacttagaaaagaattacgtgtgtgtgacaacttaaccttagctctgggttgaccctggcactggattagtttctggtcctgacttgtaaccatggaactgggagaaatttaggcagattcttatttagaccaggctccaaaaatatttgaaaattaagatgagatcaactgtttg

SEQ ID NO: 532 - DNA, 317 bp, Homo sapiens
cttttttctttttttttgaacacatgtagcatattatcaacaaatttagctctagccatgagatatgcaaaattgtaaaagtggcccattgtcaattatgcccaatctaggaattccactccagtaataaagttatcatgtcaaatggtttatttcgttgcatcttctttgatgttttgcttgggcttctgtacgctttctcacatagacctctaaacatgcaatgttttcctcttttttttattttttatttttattttttgagacggagtctttatctgtcgcccaggcaggagtgcagaccgagactccgtctt

SEQ ID NO: 533 - DNA, 1193 bp, Homo sapiens
ggcagaacctggtggctggaggcattcccagaggtggggaagagagcctgcccggccggagaacatctgccttgctgcacctgaggcccagcagagccgttcctgggactgtcagataatcggtgcagcggtggaaggagcctgcggctgctggcacagacttcacacagcacctcctctctgctgggtttccacacagcctgtcttcagatcctgctgccgcgtgcgaccagaggtgggaggcccctggtggcatggaagagggagggtcagtgccaagtctcaggaggagggcgcatgtgtgtatcaccctcagctggcggaactggctgcgaactgtgcagttacgttgcatccacaggattccagttgcgtgtctgtttccttctctttctccgtatttatttttttattcttcggaggaggtggacatttcggaagtggtggggactaagggaagaactctctagttccctcagtgtgaagcctgtcgtgttctctccccttgcactggtcatcagtattgtgtaaaggaacaactgatatacttgagtgtgcaagcaaagaacccatttgccatgctgctatgaagactacttttagatcaacaataaaaaaaaacctacaaaaaaacctttattctttaattgttgcttttacggtgatattgtgcatgcaaaccaggagcattttgtgtcttaagaaaaataatcttagaacagatggctgtgaaaattacacccatgcacagaacaagccacaggaataatagttcaggatttggtttttctctttttcttgtaaacctggagggttgatatattctttccatgcagttattagaacttagttttgttccaacagttaaacttgcaatgaaaagaaaatgtgccatttttttcactcagaattattcatagctgtatatttgaaactgctaattacacacgtgtgatgtatgttggttttttagtgcaatttcttctgtagctattctttgaccaaactgtgggtattgttaatattaatttatatttgtctcattttgtatgtatgtgtagtgtgtttgtgagtatgtgtggtttataatctgacaaagtcatgaagctcagtttggctgtaatttaattccccttcccttatttttatttatttttgtactgtgctgattcaataaaatgcactgaccatcc

SEQ ID NO: 534 - DNA, 2229 bp, Homo sapiens
ctccccttggggacagagctgaccctaagcgtgacagtcctcactgctgggtgccacacctgtgggctctcttgctctccatttgtcagaaggaggctgtgtgtatgtgtgtgcgtgcatgcgtgtgtgtgtgcaggtatgcatgtgtgtatgtgcatgcatgtatgtgtgcgcacacatgcttgtatgcatgtttgtacacgtgtgtacatgtgtgtgcactgtgcttgcaagtgtgcatgcatcgtgttgtgcatgtgtgagcatgtatgcacgtgtgtgcatgcatgtgtgcacgtgtgcttgtatgcatgtttctacacgtgtgtgcatgtgtgcacactgcttgcaggtgtgcatcatgtgcatggtgtgcatgtgtgtgcgagcatgtatgcacgtgtgtgcacacgcaggtctgtatgcatgtgtgcatgcatgtatgcgtgtgcgtgcgtgcgtgtgtgtgtgtgtgcatgctgcagcatggggctggactggtgcagtagggaggtagtcacggtcaaggtgggaaatgggaggaaagaccagaaaagattaaagttaacgcagcctttctctgtgcatagaacatcctgaagagggtagaagagaggtctgagcgggagtgcactgctttggatgctcacaaggagctggaaatggtggtgaaggcatgcaacgagggcgtcaggaaaatgagccgcacggaacagatgatcagcattcagaagaagatggagttcaagatcaagtcggtgcccatcatctcccactcccgctggctgctgaagcagggtgagctgcagcagatgtcaggccccaagacctcccggaccctgaggaccaagaagctcttccacgaaatttacctcttcctgttcaacgacctgctggtgatctgccggcagattccaggagacaagtaccaggtatttgactcagctccgcggggactgctgcgtgtggaggagctggaggaccagggccagacgctggccaacgtgttcatcctgcggctgctggagaacgcagatgaccgggaggccacctacatgctaaaggcgtcctctcagagtgagatgaagcgttggatgacctcactggcccccaacaggaggaccaagtttgtttcgttcacatcccggctgctggactgcccccaggtccagtgcgtgcacccatacgtggctcagcagccagacgagctgacgctggagctcgccgacatcctcaacatcctggacaagactgacgacgggtggatctttggcgagcgtctgcacgaccaggagagaggctgttccccagctccatgactgaggagatcttgaatcccaagatccggtcccagaacctcaaggaatgtttccgtgtccacaagatggatgaccctcagcgcagccagaacaaggaccgcaggaagctgggcagccggaatcggcaatgacccccacccagggggccagcgggagcagggcctgcatgagaccccgacagaaggtgggggggggggctctgggaagcacaggccagcacctccccaggtggcaggatctggcttggggtgcccggccctcatccctgcccacgcagtgagtgctcatgtgtcttggccccttgctcgcaaactggataaagggtgcccaagcctctcctgatgcatttgtaaacaagaaggtttcagcagtattacaccacttccttcatgcttcggagggggtggaagggggtgggcacactccagggccccccatgcccctggcccccagggactggaagaggctcccaacccagagtgtcccctgtgggaggcaggcagaaggtgacaattgacacgatttcctgcacgcgtcctcctctaccttggaagcagttagaatctaccaggcacagatgaggccgcccttgcctgacggagcttgatgagcagcccttggtctccggttccaggactgagagcccagctgcctctgcccacccttccccaggcctctgccagcctctggctgcacggtcaggccctgccccatggcaggcctgccagagcttggctggggacccctcccgcctctggctccctgatgggctggatgtaacttgtgtcttctagccccttaaggagcccaggtgttttaaggaatgaattggtcactgcatcttgtatcgattatggttctgagaaaagcaaatatcacttttggctgcattaaaagaagcatcatatat

SEQ ID NO: 535 - DNA, 573 bp, Homo sapiens
cccgattgaattctagacctgcgaccggccacagggtaacttcttaagaaaaaacaaagtaacttttaaaaagtgatataaggagagacataacgagtatgttttgaggatttctttattagtctgatagggcttccattacaaaataccacagactgcgtgtcttaaacaatagaaatttattttctcacacttctggagaccagaagtccaagatcaaggtgccaataggattggttggtttatggcgaggcctttttggcttggaaatggatgccttttgctgttttctcacatggctttttctgcttgcatgggcacacctgctatctctttctctttttataaattcacccatcctattagattagggcctgactcttatgatctcatttaattttaactacctccttgaagaccctatctctaactacagtcgtttttggggttagggcttcaatgtatgaagttggtggggagggcacattcagtccacagcaatttctaagtaagaaattaaataaatatgtttgaggaaatagtatttgaactgggtcttaaaattcaattgag

SEQ ID NO: 536 - DNA, 470 bp, Homo sapiens
tctggttaatttttgtatttttagtagagacagggtttttcgctatgttggccaggctggtctcgaactcctgacctcagctgatctacccgcctcagcttcccaaagtggtgggattacaggcatgagccactgcacctggcttgatttgcacttctctaatgatcagtgatattgagctttttttttcatatgcttcttggctgcatatatgtcttcttttgaaaagtgtctgttcatgtcatttgcccactctcttttttatctcattctgtttgcccaggctggatttcagtggcgcagtctcggctcacagcagcctcaaccctcccaggctcaggtgattgtcccacatcagctactcaggacactgaggcagaagaatcgcttgaacctgggcagaagaatcacttgaacccgagatcatgccattgcactgcagcctgggcgacagagcgagactccgtctc

SEQ ID NO: 537 - DNA, 316 bp, Homo sapiens
gccgctttttttttttttttttttttgttggctttgcgttaggatgctctgatctgacatttgacatgaacacaaagttgctagatgctcttgttgacttccagcagatgggatgggggaaacacagcagttcttggtaaagtcctttgtaataatagtttgatttttttatttcgagagaatctttcattttcctatgtatgcttttttccttttttgcccagtttccttatcacttgctgtagatggcttattttgcattcatgcagactatgttgcaagtctgtttcatctagtaaactgaaaattattgctt

SEQ ID NO: 538 - DNA, 1850 bp, Homo sapiens
ctactgatcagatggtcaatttctaaggaaaagatgtagagttattcaaaggtcatctaagtcagttcagtctttgcaaaaagaatatcaggaatgtaacgtccagtggtaaatggaacccacagtatgagaagtaacaagaattaaataggaagcctggaagcctgagactatagatctatcacagaagattcccgtaacatatcccagctctgagttcttagatttgttgatgtcaaggagcccaaatttctgaacacaaatgcctgagtttcagctggcttaagtcagagctggcatccataatgatattttgttaattctaattggttttccccacttgagaaggacccaactagtcctcagataggtacacttgaatgcaaacggttgggtctctgtccatgggtaatagcacgcacatgcaaccaatttaaaatactctgggtaagagagtcttctagagcataaactgtacttgagaaacctttgtgcttctggaaaatgggtttcatcatccttacatctgcaggttcttaggccacttatggtttcaatgctctgagctggcaagtccctataggtctatctttctgccagagagacttgcaggattataatctcacaatctcaccactcattactgttatgtcctctgcaaatctctctgcgttattttagccagcaccatgactgggcatccacggattactcttgattttctcttccctgattcacaggatgccagagagtctgagtatttagtttttctggtgaaagcattaaaattcacacattgcagcaaaatctgtcaaatcatttcacgcttattttctggggagaaaaatagaaaattacaccttgtttacaaatgaaatagtttcacttaaatgggactctagccaaggcagttaattagtcaaaagatccacagctgtcatatagtcacacattgtttattctatttgctatgtcgaccactgatgtgtatttaatattctgcatccttcacaggaaatgacaaatgccctgaattatttgcaaatagaattgctaatgaaaaagaaaaaaaatgttgatgttaattaaatggtgattaaaaatttatctcctttaaatctaaaaagtgcagctttaataatcagttgtcatataaataagtaccttgtactgaaatcccttgcggtttaagacctaaataaacactaatttgagaactctaaataccttacagaggagctggatatattcgttaacattatgcacattcctgtactgtttctttgtgcatagctgttgtgcatgaatccttgaaaaggggacatgcgttgtttctgaaatggagcctgtttgtattaaccatggctatagtagacatgattggactcaaagaaaaagaagtttgagtaggtggaagctaaatgtgttgcttgatatttaatgagtgaagggttctatgtaaaggcaattttccttccaaaagtactgtttattttcactggagacaaaattagacctttccagataccccatctctttttggtgaacagggttgaaagtgctgtggggtctatacttgaaaagttctcccaatatgcagttactgtttcccattcaatccctatacattgtactgtgttcatatctaattgtatcagatgaggtcagcttgccacttgatatagatcagagatgatcaaatgcacttatcctgtgaatacaactgcttgtgtacacatgtatataatatacatgcttgatttctacaattcacacgtaagtgtattatccaaataaaattgtacatattgtaaagtttatgttaaaaattaaatggtgatgatggtatt

SEQ ID NO: 539 - DNA, 2083 bp, Homo sapiens
agatatagtaccgcaagggaaagatgaaaaattataaccaagcataatatagcaaggactaacccctataccttctgcataatgaattaactagaaataactttgcaaggagagccaaagctaagacccccgaaaccagacgagctacctaagaacagctaaaagagcacacccgtctatgtagcaaaatagtgggaagatttataggtagaggcgacaaacctaccgagcctggtgatagctggttgtccaagatagaatcttagttcaactttaaatttgcccacagaaccctctaaatccccttgtaaatttaactgttagtccaaagaggaacagctctttggacactaggaaaaaaccttgtagagagagtaaaaaatttagaacctcccaaatttgagttgcacccttccctgtggccttatgagctcagcctcgctttgaggtacccaccgtcctgtcagctccttgacctatgagccggggcctgactaggaaaagttgggagttaaggaggaaattagcattccttaatgttttgttttggtgctctgaatttcttctttattatagtcctatagttttactcctcagttcctcaccatcatcatcttgtctaagacccccattataatattcatgcgctgctttttcatcaaaacctaccctgtcctagagatctatgggcatttggtggatgataatgagcagcccctcccagatagaatgtcaatatttgagcagtaggatattggcatttgttagttaaaggcttaaatcaaaagaatgtccaatggtaggaatttcaaggtgtaggtcagatatttgagaataggggatttttttgatgtgccttaaattataccaaagattactaattattcctctttgcccaaaatacttgcatccaaggttctagtctctgttgctgtgctggtctttagccccactgcttgcactgatgtccctccttttcacggagacctatctgaggtacaggatggggctggcaccagatgatgtcccaccacagtccctcacctccggcctccacatgacagaaccaatttacactcaaccatgacctcacccctccttggtttctccctcgatctgtggccctttttggatgtattcttatctaacaacacaatccggaaagactgaattgaatatttatactaatggttcatatcctttattgctcaatgatctaattaaagggatcattgccacatttcatgtttatatttctacaatttgtttagaaaacatctcctgaccatatcagtagctcgtgttatctttttatcaactgcttcccagagtcctaaaacaatagaaattttggattgaaaagttcagcataaggagtttgagtcagtaaaggatgggataaaggagtcgagatgattcaatgaaaagtatcacaaaaaagagattgatcaacaagagaaataaaaaagcccaagaggaagtggtaggggaaggaatttaagaacagcaataagtaaaactcttaagtaactccaaaaagaaaatggtacattttgccaaagaccacttatacttgagaacatggaagaatttgcctgatactctctttggggaaaagagtctctcctcttttcctcaaaccccagtacactcagcctctctgccccaccttctcctgactttgtcctcacttgcttctgcagtacattggaacctgaattgaaagaaagtcttccttgaataattggagtttgtcttgagaggcaaatatagccccaagaatcacaagattcgaggaccatgtaggtcttttacgtagcccaaatccataaattagtctcactttttgtatttatcgtttcatattaaaccctctatatcaaatgttcatcatgattttgtatgatttttataactattttattcattttattagatttattctaaaattttttaatggtaaattcttaaactgtggaaaccactgaaggtgcttattaactgttctcccagatttgtacaagtattggatgattccttgagtttacagctgtacaaatagtgtggaaaataaacttttttt

SEQ ID NO: 540 - DNA, 1319 bp, Homo sapiens
gtcagccttaacagtacctgctaattgattgatacctttagttagattcagcattttgagccacagtcatggccaactgagtgttttccagattgcacctttaatcaggtcgttgtatctgcgtagttttctcatgttgctgctgctgcctttgtgtgtgcatcatccttttttgtcccttcttcttctgatttgttcttactgtgccccttcataccaggggagtgtcatttggcagaagtttattgattttcttaaaaaaaacaaaagatgttgattgtctcttatgtgctgtttaaggaactgggcatttagcagtaaactagacatacaaggcctttagtagattttgtttagttgttgttactgagttataacttacataaagtacacaaatcttaagtatatagcttggtgaattttgacataaatgttgcttctgtaactacccagatcaagtcttggactttacattctagtcgaaggaaataaacaataaagaacaagcaggagggcaatgcagaaagcagtaggatgattagattaagtgtgactgtggtcagaaaggctgttctcaggagggaaggtttaatctgaactcaatgacaggaaggagccagtctttcaagaatcaagagggggccgggtgtgggtgcttggctgggcatggtggcccatgcctgtaatcccagcactttgggaggccaaggcagtggatcacttgagcccaggagttcgagaccagcctggggaatccgcatctctaccaaaaatataaaaattagctaggtgtggtggcatgccccggcaatcccagctactcaggaggctgaggtgggaggatcactcaagctgaggctgcagtgagttgtgatcgtgccagtgcactccagcctgggtgacagagtgagaccctgtctccaaaaaaaaaggagacgtgttcccagctgaggaaccagctaacatgaaattcctaggatagggatgggcttgatgagcccacagaggcagaaggcagccagtgtggttcggcctgggagtggcagagtgaggttggagagagaggagggagcagatcctggaaggctgtgtatgctgagattgagagtttccattgcattctgtgtgtggcagaatcattggagggctgcagacagggaaaggacaaacggtattttaaagaaaattattctgggtttggtttagagagaaaattggctgaggcaggagaatggcgtgaacccgggaggcggagcttgcagtaagccgagatcatgccactgcacttcagcctgggtgacatagagagactccgtccc

SEQ ID NO: 541 - DNA, 1715 bp, Homo sapiens
  misc_feature 42: n = a,c,g, or t
ccctgtcctcccgcctgtgggagggagggagggctggctcangcatcgtctcccgcaatgggcagagagagcagagacaggtggaccaacagacagctggcccctggaggcagaaaggcccttctaacttccagattgtatgcttgagtgatgggtccccagcccaagcccactcttccctcagctcacccttcagcctgttccttcttgccctgaccccagcccgtgcagctgctctactccaggaatggatgtggggactcttcctgggttctggctcctgcatagctcaccccacctcatcatgagcctcaactgcctacatctggggcaagcagcacaccggctgcagatgggacagccagccctgcctatctggacaggcccctgcagcctctgtcccctggcctagcctctctgtccttccctgagtcacagagagcaagccaagacatccaggggaaagaggaagaaaggccttagtgtgccccagcagtctggctgcgtccagccacttccaggccagggtggtggcttctctgcagaccagctgaggggaggactcctgggtggacagcctttgacgtccaccccacgctgatgcagaagctcccagaacactcaggaaacttctccggacagagccctccttgtcaacttgaggccctcccaaggccctctactgccctctgggtccagcagagggagtggaggaagggccactgcctcccacctagagcttctccgaatgacaatcagctcgtgccaggtggggaccaggatatgactcctggtgcccaggccctgggcctgctccttgccaccaaccgaaccgtgaatgtagggcccccagcctcacctctgccccaggaccaacaacaccctggtttggagctgggaggaagaagggggcctgagagagccccaggtccattctacccccagcttcactcagcactggagctggcagagacgcaaaacccagtctgcccttgggattccaaacctccctagggctcccaactgacctcaggcctctgagtcactgaatgtcaccaggagaggtgggggagggaaagtgggccagtggggagggggtcacctaggggactgcctctgtgcctctccccaggaagcatccagggcagaggaagccacatctcccggtgcccccaaccccagctgcagcctcctccccctgagcattcattctctccaccaggcctccaggtcctgagcccttcctctgtaaaagtgtcacaccacctccctcagcacttccccatcacaacaacctatgtcactgactcagatgcagggtctgctcaccccaacacatgccttccctccccagccacaccgtgcacgaagggggcacaggagaggagaggggctgtgccccaggctccccatttcccagctcctcacagaggcctggtttgctcagtcttctgaactccagggaccagccctggtgggcatggggtggggagcagggagttgcccttcccctccctcgggaagccacctaagaatgtttacatgccaaacagaatgtaacacccctccccaagcccttcccagtcactgcatggcctctgcccatcctgcacctgtccaccccaccccaacaccctggaagccactgtcaatgattagatcgggtctcggaagggaagtagccatcacaccattaaaaagcctgtggacctttt

SEQ ID NO: 542 - DNA, 350 bp, Homo sapiens
atctccctagcaactcatgaggacagacaaccaagtggcaaggttgactcccaatgggatggcagacttttcttctctcctttttgagtttgtgtttcctaagtgtttcttaacttctgagtgcaccaggctgtacccgttagatcctttcaatatgacagttttgtgcttctctctgacaggatgtttctccaccgagctgtagcacaggatgggagggaggtgggaatactccttgcctaggctggagtttacagagacactgcacagcttacactcctgttaagtgtaaatattcaacacttccattccatttgtgtaaaaaataaagcacacacgattataaaatc

SEQ ID NO: 543 - DNA, 676 bp, Homo sapiens
gcgcgccttcgccgccaaagcatccagcagccccctgctccggcccagcatggcgaccccgacccagacccccacaaaggctcctgaggaacctgacccattttactatgactacaacacggtgcagactgtgggcatgactctggcaaccatcttgttcctgctgggtatcctcatcgtcatcagcaagaaggtgaagtgcaggaaggcggactccaggtctgagagcccaacctgcaaatcctgtaagtctgagcttccctcttcagcccctggtggcggcggcgtgtaacaccttcccgaggaaactccgctgccgaccctgcccgagcgcgggagcctgaggaccgggtggaggcggtggggacccagccgcgcgccgggagcgctccccggaatgagccgccccacccaccccaaggctggagccgctgcaccctgctgtccctctccaggccttggcaatgacgatcccccaaagagcccgtctgcaccccagacccagggcctcaggcctccagctcctgggatccgggagtccatcccggcccagcacccccagcatccccgtgtatggcccccctgcacctccttgtctcatccccgaagatccgtccccctggcccctcagtgtccatgtcttgagcttaataaatgtgcatttgtttttttcctc

SEQ ID NO: 544 - DNA, 605 bp, Homo sapiens
ctccctggacagctccctgcggggcaaacagcggatgagcaagcataactttctgcaggcccataacgggcaagggctgcgggccacccggccctctgacgaccccctcagccttctggatccactctggacactcaacaagacctgaacaggttttgcctacctggtccttacactacatcatcatcatctcatgcccacctgcccacacccagcagagcttctcagtgggcacagtctcttactcccatttctgctgcctttggccctgcctggcccagcctgcacccctgtggggtggaaatgtactgcaggctctgggtcaggttctgctcctttatgggacccgacatttttcagctctttgctattgaaataataaaccaccctgttctgtgaaaaaaaaaaaaattccgattgaattctagacctgcgctttggggccaacagtaagaatttgaatcctgctgcttccacttgttagtcttgggcttgttgcttaaatctctctgcaattcactgtccttgtctgcaaaatgggaataattgttgttacagcactactagtagtaactgggcttaataaatactgaatagctgtggtc

SEQ ID NO: 545 - DNA, 477 bp, Homo sapiens
tgggctacggctgaccgttttttgtggtgtactccgtgccatcatgtccgtcctgacgccgctgctgttgcggggcttgacaggctcggcccggcggctcccagtgccgcgcgccaagatccattcgttgccgccggaggggaagcttgggatcatggaattggccgttgggcttacctcctgcttcgtgaccttcctcctgccagcgggctggatcctgtcacacctggagacctacaggaggccagagtgaaggggtccgttctgtccctcacactgtgacctgaccagccccaccggcccatcctggtcatgttactgcatttgtggccggcctcccctggatcatgtcattcaattccagtcacctcttctgcaatcatgacctcttgatgtctccatggtgacctccttgggggtcactgaccctgcttggtggggtcccccttgtaacaataaaatctatttaaacttttt

SEQ ID NO: 546 - DNA, 970 bp, Homo sapiens
gtggcactgactgtcttagctcagagctggtggatcctctccatggacaatgacactttaaggattgtcttggtttgtttttcctatttgtggggtattttccccctcaggctcctgggtctgctgctgcctcaaggtgtcctgaccttgaggctgatgaggggacccctgcctgtttcccccatactgagttctagggaggtgctcaccccagactcttaggaagggtctagagaaatgagaggagcccaagccaggggccagctccgagaaagggtaacctccacgcttctctctcccaaattggaaatgaagacaggttttcaaaggcacaggctccccctgccagcttctaggatcttccttggtgtgcaatgggccagttaggggtaggcagcttgcacccagttctcctttatctcaacttattttcctggggagaggtgcctagagggattgaggtaacttcaactgggaattccaaggaaggtgggcaagtagccttggctctctcccaccatgtccatcaggattgagagtgtgtctagctcccgaccactttgtcttgacctactgaaaagttgggaactgaggggtgccttcattcccctttgttcactttctccagctcaacttgggacttgggtggtgggactggagacctcacccctgctcccgtcccgccccctttctatcccaacctgtttccatgtagcagacccttcctagggagcagggaggggaagccacagattgcaaacccaggggctcctttttcattctttctaaaaccttgatatcctcagcccaaaggcgatgcccccctgccacctccaagcctggaattgtgcataacccggatcttgtatctttgtataacggatgttatttgtacgaagggcagttcgtaaacagcacttgttcttttaataaaagaatgttttgcaaaaaaaaaaaaaaaaatccgaag

SEQ ID NO: 547 - DNA, 1303 bp, Homo sapiens
  misc_feature 1129: n = a,c,g, or t
tttttttttttttttggtaggaaatgtctttattattggccttgagtcatcatgtagtgtctgacataggttacgtgtccagaggatctgcctggcacacgctagctacccctgcccactggagcagcccctctggccgacgccaggcctttgtccatcatgccagggaagccaaccccaccatcccacaagttcatgctaggggtgctgaggaacaaggctgtcctaggattggaccctccatcctggacaggggtcctggggaggatgaggctgaggcctggatgatcagtctctttttggtttcatgatcatttaaaaaacagaaaagacaaacatttcacagtctttaaaaaatagaagtctgaggagagaagccagagtcctgggccccgggaggcccctcgaggcctcagcattccctgtcccttgaggtctgtctgcaggcctggccacagcacacgtggccccgtcatggtcactggcccgagccgtagggccagttgaaggtactccccgacagcagcatgtctctgatcagtgtctcaatgggcgtcttccccaccaggcgcatgaagaacagctgggagatgagggaggcagggaccgcgcgcagggcggggagccgcagcagcaggcgccccaaacgctggggctgggacgggtactgcgcccgcacatactcggtgagggccacctgcgccttctcctgcaggctctcaacgtgggccgggtctgagaggccacaggcgtcgggcgtgaagagcgcgatggccttgaggcagccatactccgccgagtcgacctgcaggcggcccagcttgtccacctgctcctggaaggcgcgcacctggtccatgaaagccacggcgcgctcggcggccataggcgcggcgtggaggccggcggcggccagtagcggcgccgtgtgcaggggcagcgccgcctgcgccgcgttcagcacgaagagctcgctccagctcaggcgcagcagcgccacctggtcggccaccggcagctcggggaagaagggcgtgtggcgcgcccactccacggtgctgaagagcagccgcgccgccagctcgcacacgttgtcgatgcccagcaccgcgcccgccgcgccgccccntgcgccgaagcgtccggccgccgcagggtagggctcagcgcgcagcagctgcgcgatcagttcggacaccggctgccccgggaagaggtatccgccgctcgccactgccgccagcgccgagcccggggggctgcccgaggaggcggccacggcaccaggcagcgagtgcgggat

SEQ ID NO: 548 - DNA, 444 bp, Homo sapiens
ggctgtggaacaaaacacgctgcaggagttcctgaagctggcttgagtcaagcctgtccagagttcccctgctggactccatcaccacactccccccagccttcacctggccatgaaggaccttttgaccaactccctgtcattcctaacctaaccttagagtccctcccccaatgcaggccacttctcctccctcctctctaaatgtagtcccctctcctccatctaaaggcaacattccttacccattagtctcagaaattgtcttaagcaacagccccaaatgctggctgcccccagccaagcattggggccgccatcctgcctggcactggctgatgggcacctctgttggttccatcagccagagctctgccaaaggccccgcagtccctctcccaggaggaccctagaggcaattaaatgatgtcctgttccattggc

SEQ ID NO: 549 - DNA, 779 bp, Homo sapiens
ggaaaccgctcccgagcacggcggcggcgtcgtctcccggcagtgcagctgccgctaccgccgccctctgcccgccggcccgtctgtctacccccagcatgagcggcctgcgcgtctacagcacgtctgtcaccggctcccgcgaaatcaagtcccagcagagcgaggtgacccgaatcctggatgggaagcgcatccaataccagctagtggacatctcccaggacaacgccctgagggatgagatgcgagccttggcaggcaaccccaaggccaccccaccccagattgtcaacggggaccaagtactgtggggactatgaactcttcgtggaggctgtggaacaaaacacgctgcaggagttcctgaagctggcttgagtcaagcctgtccagagttcccctgctggactccatcaccacactccccccagccttcacctggccatgaaggaccttttgaccaactccctgtcattcctaacctaaccttagagtccctcccccaatgcaggccacttctcctccctcctctctaaatgtagtcccctctcctccatctaaaggcaacattccttacccattagtctcagaaattgtcttaagcaacagccccaaatgctggctgcccccagccaagcattggggccgccatcctgcctggcactggctgatgggcacctctgttggttccatcagccagagctctgccaaaggccccgcagtccctctcccaggaggaccctagaggcaattaaatgatgtcctgttccattgcc

SEQ ID NO: 550 - DNA, 1223 bp, Homo sapiens
ttttttttttttttttttttaaaaaattgaactagaccaaacttagccaagctttatttggcttatacgtctagctgtgttgtccttgaacacccaagacaatcaatcttttacatataattgctgcttaataaatgtatttgaattgaattacaatatccttatcacatgaatatattatgtaaatatttagtacaaaagcagtatgcaatataaaaagagaataaaattaggaacagaaattcttgcaactttgcttcaagttctgcctttgctgctaacaagctgtgtaatagaagtggttttgtttgcttgttggacctcaagtgcagagaattaggctaaccattcctaatagtgcatgggacatagtcatgataagtattctaaaatcctgctcaagctttcttttctccttttgttctgaacacctgttttatccaacttctcccccacctcatactctattaagcttgatatatgttctgagttgtgcttataaaatatatagtaatgttgtgtgttcatctgcttttatttatatgagtagtgtttgtgctgtatttctcatttgaactattttttttcactcatcatttttaagatgatccatatgactctatgtatatgtaggatattaggatttaaaaaaatcatgtaggccaggtgtggtggttcatgactgtaagcccaaaactttgggaggccaaaatgggcagattgcttgaacccaggaatttgagattagcatgggcaacaaagtgagaccctgtctctacaaaaaatacaaaaattagctggcatggtggcacatgtctatagtcccagctgcttgtggggctgagggagaaggatcgcttgagcccatgaggtcaaggctgcagtgagcagtgattgtgccactgtgctccagcctggatgacagagagaccttgtctcaaaaatataaataaaaataaaaaataaaaataaatcatctacattaattttttaaattctcttattcatacacagctatttattagtatcaaatacattcaatgcacaataatgaacatagtctttggcctctgggaatataggactaaataactatatctgacaaaaaaactctaattttaatttctagttaagagtttgaaactacagataaaatggcttcctttctctcttataagtattttctacaaaatacaaattcttcccgattgaattctagacct

SEQ ID NO: 551 - DNA, 2805 bp, Homo sapiens
cattttggttggctataaagctgtatatcgtttgtgctttggtttggctatgttctatcttcttctctctttactaatgatcaaagtgaagagtagcagtgatcctagagctgcagtgcacaatggattttggttctttaaatttgctgcagcaattgcaattattattggggcattcttcattccagaaggaacttttacaactgtgtggttttatgtaggcatggcaggtgccttttgtttcatcctcatacaactagtcttacttattgattttgcacattcatggaatgaatcgtgggttgaaaaaatggaagaagggaactcgagatgttggtatgcagccttgttatcagctacagctctgaattatctgctgtctttagttgctatcgtcctgttctttgtctactacactcatccagccagttgttcagaaaacaaggctttcatcagtgtcaacatgctcctctgcgttggtgcttctgtaatgtctatactgccaaaaatccaagaatcacaaccaagatctggtttgttacagtcttcagtaattacagtctacacaatgtatttgacatggtcagctatgaccaatgaaccagaaacaaattgcaacccaagtctactaagcataattggctacaatacaacaagcactgtcccaaaggaaggcagtcagtccagttgtggcatgctcaaggaattataggactaattctctctttgtggtgtgtattttattccagcatccgtacttcaaacaatagtcaggttaataaactgactctaacaagtgatgaatctacattaatagaagatggtggagctagaagtgatggatcactggaagatggggacgaagttcaccgagctgtagataatgaaagggatggtgtcacttacagttattccttctttcacttcatgcttttcctggcttcactttatatcatgatgacccttaccaactggtacaggtatgaaccctctcgtgagatgaaaagtcagtggacagctgtctgggtgaaaatctcttccagttggattggcatcgtgctgtatgtttggacactcgtggcaccacttgttcttacaaatcgtgattttgactgagtgagacttctagcatgaaagtcccactttgattattgcttatttgaaaacagtattcccaacttttgtaaagttgtgtatgtttttgcttcccatgtaacttctccagtgttctggcatgaattagattttactgcttgtcattttgttattttcttaccaagtgcattgatatgtgaagtagaatgaattgcagaggaaagttttatgaatatggtgatgagttagtaaaagtggccattattgggcttattctctgctctatagttgtgaaatgaagagtaaaaacaaatttgtttgactattttaaaattatattagaccttaagctgttttagcaagcattaaagcaaatgtatggctgccttttgaaatatttgatgtgttgcctggcaggatactgcaaagaacatggtttattttaaaatttataaacaagtcacttaaatgccagttgtctgaaaaatcttataaggttttacccttgatacggaatttacacaggtagggagtgtttagtggacaatagtgtaggttatggatggaggtgtcggtactaaattgaataacgagtaaataatcttacttgggtagagatggcctttgccaacaaagtgaactgttttggttgttttaaactcatgaagtatgggttcagtggaaatgtttggaactctgaaggatttagacaaggttttgaaaaggataatcattggttagaaggaagtgtttgaaagtcactttgaaagttagttttgggccagcacggtagctcacccttgtaatcccagcactttgggaggctgaggtgggtagattacttgagcccaggaattcaagaccagcctgggcaacatggtgaaaccctgtttctataaaaaataatctgggctttgtagcatatgcctgtggtcccagctactgaggaggctgaggtgggaggattgcttgagcccaggaggcagaggttgcagtgagccaaggtcacgtcactgcactctagcctgggcaacagagtaagacaaaaaaatatatatatattgaaaatcaaaggaggccaaattttgacagggaaggaagtaactgcaaaacactaggctttagtaggtacttatataaaatctagtccagttctctcatttaaaaaaatgaagacactgaagtacagacttaaatagctcagatagctaattaggaaatttcaagtgggccaataatagcattctctctgacatttaaaaataatttctattcaaaatacatgcataattgattttacacctcattactggtggataatttatgtgatgtggattgctggtgtccagcatgacccataaacaggtcagaagaatgatggaatgttttagaataaactcctgcttatagtatactacacagttcaaaagatgtttaaaatgcttttgtatttactgccatgtaattgaaatatatagattattgttacctttcaacctgaaaatcaagcagtatgagagtttagttatttgtatgtgtcactagtgtctaatgaagcttttaaaatctacaattcttctttaaaaatatttattaatgtgaatggaatataacaatcagcttaattccccaaccctattcggtgtgtagacatggtattccacaattttgaatgggctgtgttttacctctaaataaatgaattccgag

SEQ ID NO: 552 - DNA, 625 bp, Homo sapiens
ggtatttattggattggaaatctgtagcaagatgctgtttaaaattaccatattgtttttttatcttatacttagctctctggctattgaacttccttttcttgtttgaagttagcttcaaatttgctcctatgctaaattacctgtaaatattctggataggaactacttgaaatagtaatttgttaaaagatatgacaaaatgaaaatgcttaaactacagaaatttaaaaatgccataacaatcttgcaagactaactttaaaatatactttaaatgattattatgattttggtggtaacgatcccccacacacaaccactatgaagaaataatgccgcatttttccccccattgtaccaaaaagataaaaaaatggtaaacactgatcaaggtatttttgtattgtcaaggcatgcatattctaaagaattaaatgctaacttaacagcactggctttctggctggtcaactatatgaaaccttgttcattcctccgagtactgtaatgttcacacttgtacaatcttccctgtcatgactttaagttctacttttcattaaccatggcctgatattagttcttagagcttcttgtggcaaaaataaatgatttaattctg

SEQ ID NO: 553 - DNA, 540 bp, Homo sapiens
agtcctcctccgcctcctcctctctgcatgcgcgtcagagcccgtgccaagaacaagcagcagtcctgaactcgaggtccataaaaatcagtcgactgaatgacaccatcaaatctttgaaacaacagaagaaacaagtggaacatcagctggaagaagaaaagaaagcaaacaatgagaaacagaaagctgaaagggagctagagggtcaaatccagagattgaacacagagaaaaagaaactaaatacggacctgtatcacatgaaacattctctcagatactttgaagaagagtccaaggatctggccggccgcctgcaacgttcatcgcagcgtataggagagttagagtggtctctctgtgctgtcgccgccacacagaagaagaagccggatgggttctcgagccgcagtaaagcacttctcaagcggcagttagagcagtccatacgggagcagatactgctgaaaggacacgtgacacagttgaaggagtcgcttaaagaagtccagctggagagagatcaatatgctgaac

SEQ ID NO: 554 - DNA, 860 bp, Homo sapiens
ccagaatgcacttgactacatgaaaaagcacatccctagcgccaagaatttggatgccgacatctggaaaaagtttttgtctcgcccagccttgccatttatcctaaggctgcttcggggcctggccatccagcaccctggcacccaggttctgattggaactgattccatcccgaacctgcataagctggagcaggtgtccagtgatgagggcattgggaccttggcagagaacctgctggaagccctgcgggaacaccctgacgtaaacaagaagattgacgcagcccgcagggagacccgggcagagaagaagcgcatggccatggcaatgaggcagaaggccctgggcaccctgggcatgacgacaaatgaaaagggccaggtcgtgaccaagacagcactcctgaagcagatggaagagctgatcgaggagcctggcctcacgtgctgcatctgcagggagggatacaagttccagcccacaaaggtcctgggcatttataccttcacgaagcgggtagccttggaggagatggagaataagcccccggaaacagcagggctaacagcaccgtgtcccacttcaacattgtgcactacgactgccatctggctgccgtcaggttggctcgaggccgggaagagtgggagagtgccgccctgcagaatgccaacaccaagtgcaacgggctccttccggtctggggacctcatgtccctgaatcagcttttgccacttgcttggcaagacacaacacttacctccaggaatgtacaggccagcgggagcccacgtatcagcttcatacttgagtgtgcacatcttgagaaataaacaagtgacttaacacacattg

SEQ ID NO: 555 - DNA, 1318 bp, Homo sapiens
cagcatttattgcccttccatcaatcttgcaaagaatcttacaggatccagtttatggaaaaggaaaacttggagaaatccagggacttatcttgggaatgttagatacctttaactatgaacaaaccctgctggaaacaacaaccagccttctaaaccaagatctccattggtcattgtgtaacctgagagcttcggtcaccagaggactgaatcccaaacaagattactgctctatatgtttgcagcagtacaagagacgccaagaaatggctgatgaaataattgtctttagctgtggccatttgtatcactcattctgcctacaaaacaaagaatgcactgtggaatttgagggccaaacaagatggacatgctacaaatgcagttcaagtaacaaagtaggaaaactcagtgaaaattcatctgaaattaaaaagggaaggataaccccatcacaggtaaaaatgtctccatcgtatcatcagtccaaaggggatcccactgctaaaaagggaacctcagaacctgttctggatccacagcaaatccaagcatttgatcagctttgccgtctctaccgaggaagctccaggctggctctcctcacggaactctcccagaatcgcagcagcgagagctataggccattcagtggctcgaagagtgctcctgctttcaacagcatcttccagaatgagaacttccagctgcagctcattcctccacctgagattgaggattgatgattccatggagcctggcccaggagaaccagagttgatcccgaggcagctggggagaggccccgcctctggtgggcttggcctccaccacctcccatgcttctgagaagaggttccaaattgggctcctgtgcccagagcgtccacagcaccattcccagtgtagactcccagtcttctccacattgctgtcatggcgtcagttcaccagactcattgattttgttttgcttgttaagcaaaggaatgtcacatacctctgtccagctttttaggaaatcacatttcgcctattgcgactttttccatttaccctgaagcctagaaagtaggtggaactcacacaaatggcattccagagtctgccatactccgtctcctccaggtgctggataatacagaggacttcaacttctacagggaacagtggttggccaggctgcagtataactgaagcatgccttggagagagcagacactgtggggccagggccatctccctttaatgtgttcatgttaaaacctatttgagtgtaagacttgccctttctaacaataaatgctctgtgttt

SEQ ID NO: 556 - DNA, 3054 bp, Homo sapiens
cgaggaatgcgtgctctcaggcaaggatgtcaacggcgagtgtgggaacttcgtcaggctcatccagccctggaaccgaacacacctgtatgtgtgcgggacaggtgcctacaaccccatgtgcacctatgtgaaccgcggacgccgcgcccaggccacaccatggacccagactcaggcggtcagaggccgcggcagcagagccacggatggtgccctccgcccgatgcccacagccccacgccaggattacatcttctacctggagcctgagcgactcgagtcagggaagggcaagtgtccgtacgatcccaagctggacacagcatcggccctcatcaatgaggagctctatgctggtgtgtacatcgattttatgggcactgatgcagccatcttccgcacacttggaaagcagacagccatgcgcacggatcagtacaactcccggtggctgaacgacccgtcgttcatccatgctgagctcattcctgacagtgcggagcgcaatgatgataagctttacttcttcttccgtgagcggtcggcagaggcgccgcagagcccgcggtgtacgcccgcatcgggcgcatttgcctgaacgatgacggtggtcactgttgcctggtcaacaagtggagcacattcctgaaggcgcggctcgtctgctctgtcccgggcgaggatggcattgagactcactttgatgagctccaggacgtgtttgtccagcagacccaggacgtgaggaaccctgtcatttacgctgtctttacctcctctggctccgtgttccgaggctctgccgtgtgtgtctactccatggctgatattcgcatggtcttcaacgggccctttgcccacaaagaggggcccaactaccagtggatgcccttctcagggaagatgccctacccacggccgggcacgtgccctggtggaaccttcacgccatctatgaagtccaccaaggattatcctgatgaggtgatcaacttcatgcgcagccacccactcatgtaccaggccgtgtaccctctgcagcggcggccctggtagtcgcacaggtgctccctaccgccttaccactattgccgtggaccaggtggatgcagccgacgggcgctatgaggtgcttttcctgggcacagcatccccagccccactgaggccctgcccggcccgttccagaccgcgggacagtgcagaaggtcattgtgctgcccaaggatgaccaggagatggaggagctcatgctggaggaggtggaggtcttcaaggatccagcacccgtcaagaccatgaccatctcttctaagaggcaacaactctacgtggcgtcagccgtgggtgtcacacacctgagcctgcaccgctgccaggcgtatggggctgcctgtgctgactgctgccttgcccgggacccttactgtgcctgggatggccaggcctgctcccgctatacagcatcctccaagaggcggagccgccggcaggacgtccggcacggaaaccccatcaggcagtgccgttggttcaactccaatgccaacaagaatgccgtggagtctgtgcagtatggcgtggccggcagcgcagccttccttgagtgccagccccgctcgccccaagccactgttaagtggctgttccagcgagatcctggtgaccggcgccgagagattcgtgcagaggaccgcttcctgcgcacagagcagggcttgttgctccgtgcactgcagctcagcgatcgtggcctctactcctgcacagccactgagaacaactttaagcacgtcgtcacacgagtgcagctgcatgtactgggccgggacgccgtccatgctgccctcttcccaccactgtccatgagcgccccgccacccccaggcgcaggccccccaacgcctccttaccaggagttagcccagctgctggcccagccagaagtgggcctcatccaccagtactgccagggttactggcgccatgtgccccccagccccagggaggctccaggggcaccccggtctcctgagccccaggaccagaaaaagccccggaaccgccggcaccaccctccggacacatgaggccagttgcctgtgcttgccatgggccagcctagcccttgtcctttttaatataaaagatatatatatatatatatatatatataaaatatctatattctatacacaccctgcccctgcaaagacagtatttattggtgggttgaatatagcctgcctcagtggcagcatcctccaaaacttagacccatgctggtcagagacggcagaaaacagagcctgcctaaccaggcccagccagttggtggggccaggccaggaccacacagtccccagactcagctggaagtctacctgctggacagcctccgccaagatctacaggacaaagggagggagcaagccctactcggatggggcacggactgtccaccttttctgatgtgtgttgtcagcctgtgctgtggcatagacatggatgcgaggaccactttggagactggggtggcctcaagagcacacagagaagggaagaaggggccatcacaggatgccagcccctgcatgggttgggggcactcagccacgaccagccccttcgtgggtatttattctctatttattggggataggagaagaggcatcctgcctgggtgggacagccccttcagccccttctcccctccccgcctggccagggcagggccaccccactctacctccttagctttccctgtgccactttgactcagaggctgggagcatagcagaggggccaggcccaggcagagctgacgggaggccccagctctgaggggagggggtccgtggtagaggcctggggccggtagagctccccagggctcccttatgtccaccacttcaggggatgggtgtggatgtaattagctctggggggcagttgggtagatgggtgggggtctcctggtggccttctgctgcccaggccacagccgcctttgggttccatcttgctaataaacactggctctgggactag

SEQ ID NO: 557 - DNA, 1088 bp, Homo sapiens
tttttttttttgcactgaaatgagactttattctgaaattattaaaaagaacagagatgctccatttggctgcatgcagggggggcggttggggggacagaggggaggacaggggctcagccagggggaccgtgtctctttcccacgcaggacactgtgcatggggctctgggtgcatctgcccatctgtctatgggcctgtgtgtgtgtgagaggccaaacacagagagctccgtgggtctgtgtgtatccaagtgctaaaaggcaggctggctttctggggcccacagctggcgggctagtatcctggaaggtttcacttggtggcttggcctagggaccaccaagggctggggtgggaagggtggctcaaggaacctctttctccaactccacacccctagaatccttctctcccctccagataaaaagtctcctcccctgggcatgactccccccaccccgcaagctgagacctgcaagaaggggactgcccctttgggggaggggtcgggccttggggctggtgggtgggtaagggggcctgactgaggggcagaccaacccagcctgtgtctctattgttgcctctgggattggggggtgctaaccgcttacttgcttttggcctgggggtaccgcagggttcccttttccggaagccccccacagggcagacccggggagaagggcttccccaatctggcccccagccagaatacacacaagggagtggaagctaagagccgggagggggccggtgaagggagggaggaaggggaacctggctcctctcagaactgggaggcgctgctggggtcgcactgcagcagacgcacgatggacgggtcgcttttggccccgcggatgaactcctccaaggacagcttgccgtcgttgtttgtgtccatttggcggaagattttctcagtcctcttttccggggtcgactcgtcctccggcatcttcatcacggacgaaaccatcttgtaaatggcctgcacgatctccagcatctcctcccggctgatgtagccgttgccgtccaggtcatacatgctgaaggcccacatgagcttctgctccag

SEQ ID NO: 558 - DNA, 530 bp, Homo sapiens
gctttttttttttttttgtcttctttatcttcttcatcctcatcatcttcatccccttggtcatcactgtcatcgtcatcatcatcgtcataatcactgtctcctcccttccttcttcgcttgcgtcctggagtgggtgtgcccaagggatgctgctcttctcccagatcaatgccacctgaagtgtctcttttgcctgttttcttagcatgaatgattctgagcttgcggagtttaccttctaccacccatttatctctcctcaagtttgacatataatcaatgttcttgtcgatttcactgaccacactcttgctgcatgccagttcattgatcaggaaagccaggactgaagctttctgtgctggagtgtgagcctgaaaagctttggtcttcagactttcagtaagctcagtttgtccacagtgggcttccataaatatctgtaaaatctcggaaacattgtctcgattcacaccaacattcagcaaatgttctccaagagctgttttagattgaattctagacct

SEQ ID NO: 559 - DNA, 1446 bp, Homo sapiens
caaagccttgaacatatttgtggaaagacgaatatcagctctgcctgttgtggatgagtcaggaaaagttgtagatatttattccaaatttgatgtaattaatcttgctgctgagaaaacatacaataacctagatatcacggtgacccaggcccttcagcaccgttcacagtattttgaaggtgttgtgaagtgcaataagctggaaatactggagaccatcgtggacagaatagtaagagctgaggtccatcggctggtggtggtaaatgaagcagatagtattgtgggtattatttccctgtcggacattctgcaagccctgatcctcacaccagcaggtgccaaacaaaaggagacagaaacggagtgaccgccgtgaatgtagacgccctaggaggagaacttgaacaaagtctctgggtcacgttttgcctcatgaacactggctgcaagtggttaagaatgtatatcagggtttaacgataggtatttcttccagtgatgttgaaattaagcttaaaaaagaaagattttatgtgcttgaagattcaggcttgcattaaaagactgttttcagacctttgtctgaaggatttaaatgctgtatgtcattaaagtgcactgtgtcctgaagttttcattatttttcatttcaaagaattcactggtatggaacaggtgatgtggcataaggtgagtgcacggtatgtgcagatcacagtgccttatgtccgaatacagcaatatgtcaccgccgcagccggggcgcacgcgtgtgaaacaacaccgagcttgaatgtggaagtctttgaaccttttaccaaatcagtttgttttctttagatttgtcaaaaagttgtaatttgaatataaataattactttaaaattttaatgacacttttaccgtaagtgttttgttctgggctaccgtgtcacgaagctgctttacaacagctttatttatttttactttcatgcaatttttttacacatcttttggtggagtaaacttcaccacatccatgaaataaactctcagttattttgaaatggcaaatttctcattatttaagtttggatctggaaaggacatgacttctgaaatagccgctgctgggttttaaaagctgaggtctctcaaagtgtggaggagacgttgccgtcaggcgggagccaagtgccgggaagatgtctattttttttcttgtgtattgaaatgtaaaatcatgatgtttgttatgactgctgatgcgattgtttttgtaaattttattgtggcatatacagtattgtcatacagttgaagagaaacaatgtttcctaatgtaagtgctctgaaaatgttgacactgtatgtatatatatgaggatagtttgtttttttttgttttgggttttttttttttcagattgaaaaattaaaataaatcctacttttttg

SEQ ID NO: 560 - DNA, 469 bp, Homo sapiens
aaatttatttctccaaatcgagagtgattttttaaaaattttttatctttatatggtttcagaagtatgaaccagctttctttttattattgtgagatcattttgttttataacatagttgttgactgttaatatggacctgctagaatttggatcactttccattgaagtcagggtattgtgcataatacaaagtattggactgagatatttggttgccatggaggcaatgcttttttcatcttattaaatgtgatgtgacttttttctttgtacagaagagtactgtatttttgaatagcctactcccagtaagagcaaatctgtatgataacattttttcctctggacataagacataacagtaacacgatgttcatttacaagcggccttatgttcatttcccacaatctttttaaggcgaaattgtgaccatatgtgtttaattaaaatcgttcttaatcccct

SEQ ID NO: 561 - DNA, 685 bp, Homo sapiens
gcgaggcctgctgggcttggcaacgagggactcggcctcggaggcgacccagaccacacagacactgggtcaaggagtaagcagaggataaacaactggaaggagagcaagcacaaagtcatcatggcttcagcgtctgctcgtggaaaccaagataaagatgcccattttccaccaccaagcaagcagagcctgttgttttgtccaaaatcaaaactgcacatccacagagcagagatctcaaagattatgcgagaatgtcaggaagaaagtttctggaagagagctctgcctttttctcttgtaagcatgcttgtcacccagggactagtctaccaaggttatttggcagctaattctagatttggatcattgcccaaagttgcacttgctggtctcttgggatttggccttggaaaggtatcatacataggagtatgccagagtaaattccatttttttgaagatcagctccgtggggctggttttggtccacagcataacaggcactgcctccttacctgtgaggaatgcaaaataaagcatggattaagtgagaagggagactctcagccttcagcttcctaaattctgtgtctgtgactttcgaagttttttaaacctctgaattggtacacatttaaaatttcaagtgtactttaaaataaaatacttctaatggaac

SEQ ID NO: 562 - DNA, 505 bp, Homo sapiens
tttttttttttttttgtctagattttatgtatacgggttcttcgaatgtgtggtagggtggggggcatccatatagtcactccaggtttatggagggttcttctactattaggacttttcgcttcgaagcgaaggcttctcaaatcatgaaaattattaatattactgctgttagagaaatgaatgagcctacagatgataggatgtttcatgtggtgtatgcatcggggtagtccgagtaacgtcggggcattccggataggccgagaaagtgttgtgggaagaaagttagatttacgccgatgaatatgatagtgaaatggattttggcgtaggtttggtctagggtgtagcctgagaataggggaaatcagtgaatgaagcctcctatgatggcaaatacagctcctattgataggacatagtggaagtgagctacaacgtagtacgtgtcgtgtagtacgatgtctagtgatgagtttgcttcccgattgaatctagacct

SEQ ID NO: 563 - DNA, 1722 bp, Homo sapiens
gagaggtgccttagccctggattccaaggcatttccacttggtgatcagcactgcacacagaggactcaccatggagttggggctgtgctgggttttccttgttgctgttttagaaggtgtccagtgtgaggtgcaggtggtggagtccgggggcggcttggtacagcctggagggtccctgagactctcctgtgaagtctctggattcacctttagcacttatgagatgaattgggtccgccaggctccagggaaggggctggagtggctttcatatataagtagtaatggccggaccaaatattacacagactctgtgaagggccgattcaccgtctccagagagaacgccaagaactcagtctctctgcagatgagcagtttgagacgcgaagattcggctctttatttctgtgcgagaggcggaatgcagctttcgagagtgggccactattacatggatgtctggggcaaaggggccacggtgatcgtctcctcagcttccaccaagggcccatcggtcttccccctggcgccctgctccaggagcacctctgggggcacagcggccctgggctgcctggtcaaggactacttccccgaaccggtgacggtgtcgtggaactcaggcgccctgaccagcggcgtgcacaccttcccggctgtcctacagtcctcaggactctactccctcagcagcgtggtgaccgtgccctccagcagcttgggcacccagacctacacctgcaacgtgaatcacaagcccagcaacaccaaggtggacaagagagttgagctcaaaaccccacttggtgacacaactcacacatgcccacggtgcccagagcccaaatcttgtgacacacctcccccgtgcccacggtgcccagagcccaaatcttgtgacacacctcccccatgcccacggtgcccagcacctgaactcctgggaggaccgtcagtcttcctcttccccccaaaacccaaggatacccttatgatttcccggacccctgaggtcacgtgcgtggtggtggacgtgagccacgaagaccccgaggtccagttcaagtggtacgtggacggcgtggaggtgcataatgccaagacaaagccgcgggaggagcagttcaacagcacgttccgtgtggtcagcgtcctcaccgtcctgcaccaggactggctgaacggcaaggagtacaagtgcaaggtctccaacaaagccctcccagcccccatcgagaaaaccatctccaaaaccaaaggacagccccgagaaccacaggtgtacaccctgcccccatcccgggaggagatgaccaagaaccaggtcagcctgacctgcctggtcaaaggcttctaccccagcgacatcgccgtggagtgggagagcagcgggcagccggagaacaactacaacaccacgcctcccatgctggactccgacggctccttcttcctctacagcaagctcaccgtggacaagagcaggtggcagcaggggaacatcttctcatgctccgtgatgcatgaggctctgcacaaccgcttcacgcagaagagcctctccctgtctccgggtaaatgagtgcgacggccggcaagcccccgctccccgggctctcggggtcgcgcgaggatgcttggcacgtaccccgtgtacatacttcccgggcacccagcatggaaataaagcacccagcgctgccctgggcccctgc

SEQ ID NO: 564 - DNA, 1312 bp, Homo sapiens
tgcgcggatcggcgtccgcagcgggcggctgctgagctgccttgaggtgcagtgttggggatccagagccatgtcggacctgctactactgggcctgattgggggcctgactctcttactgctgctgacgctgctggcctttgccgggtactcagggctactggctggggtggaagtgagtgctgggtcaccccccatccgcaacgtcactgtggcctacaagttccacatggggctctatggtgagactgggcggcttttcactgagagctgcagcatctctcccaagctccgctccatcgctgtctactatgacaacccccacatggtgccccctgataagtgccgatgtgccgtgggcagcatcctgagtgaaggtgaggaatcgccctcccctgagctcatcgacctctaccagaaatttggcttcaaggtgttctccttcccggcacccagccatgtggtgacagccaccttcccctacaccaccattctgtccatctggctggctacccgccgtgtccatcctgccttggacacctacatcaaggagcggaagctgtgtgcctatcctcggctggagatctaccaggaagaccagatccatttcatgtgcccactggcacggcagggagacttctatgtgcctgagatgaaggagacagagtggaaatggcgggggcttgtggaggccattgacacccaggtggatggcacaggagctgacacaatgagtgacacgagttctgtaagcttggaagtgagccctggcagccgggagacttcagctgccacactgtcacctggggcgagcagccgtggctgggatgacggtgacacccgcagcgagcacagctacagcgagtcaggtgccagcggctcctcttttgaggagctggacttggagggcgaggggcccttaggggagtcacggctggaccctgggactgagcccctggggactaccaagtggctctgggagcccactgcccctgagaagggcaaggagtaacccatggcctgcaccctcctgcagtgcagttgctgaggaactgagcagactctccagcagactctccagccctcttcctccttcctctgggggaggaggggttcctgagggacctgacttcccctgctccaggcctcttgctaagccttctcctcactgccctttaggctcccagggccagaggagccagggactattttctgcaccagcccccagggctgccgcccctgttgtgtcttttttttcagactcacagtggagcttccaggacccagaataaagccaatgatttacttgttt

SEQ ID NO: 565 - DNA, 1142 bp, Homo sapiens
ctatgaagataaaataattgggggccatctagaaatagaaaggcagtgggaagacagattctacggcactgctttcatttaattgggctttaggcactccattcgaatgcagaacctcacctctagttgagaccaagaattggcaaatttgcatgagctcctggaaagagttgctgactttgtatctaagacctgccagggaataccaagagttgtttctacagactttttttttttttttgtatgggagaagatactgtggcaaccaggaaggaatggaaaaaaaattcttttctctacagcaaattaatgtgaggaagctcctccaatcctctggctatttaaggttcaaaatcaagtgcctagggaaaattccaatggatgattttctgggagctatcttgtctaccttgaggttcctgaacaatgaattcccattaatgagcagtcttcagtattaaaaccactgtcttgtcacctcattttgcattactgtcttccgtggatgtttcagttacaactgtaatgttatttatagaacaacattaatccattaaagctaacctatttttcaatatttatgataatctatgtacatatattgtctgtccatatgtatttgtaaataggttgtatataatgtcaggtttgggtcttgggttcaagtgtatatattcctgtaagtttcttaactgcattttgatgaattcacattatgtaactataagaattgtcccaaaagtacctgtacagaaaattgaatattgaaaaattgacaaattgtgtacaaacactaaaaaaaacttgtttaaattgtatttgcaataaacaacatcaaattttttcatgaaatcttggtacaaattcagatctcttatttaaaatttaaataaggaatacattttcaaaatgcagtaatcaaaatgtgatctagtgtaatgaaataaaatgtgatctagtgtaatggaagacctttgagaacctgggtgtattaactttgtgtatatagtgtaaatacccccactgtactgttagaggccaacaattctagtatggcttgttggcaaagagtgctacaccgtttcaatgaaacaatgtatgtttgttttaactgaactaaaataaatacatgcttaatcctg

SEQ ID NO: 566 - DNA, 1216 bp, Homo sapiens
gacagatgattccagttttttaggtggtggcggcagtcggatagacaataccacaacaacacattttgcagagctttggggccatttggatcacacgatgttttttcaagattttagaccctttctaagtatcagtccactggaccaagataatacagccaatgaaaggggtcaccagactcacactgacttctggggagcaagacctccacggttgccattgggtccgagatacagatctcgaggaagttctcgtcctgacagatctccagctattgaaggaatactacaacacatctttgcaggattctttgcaaattctgccattcctggatctccacaccctttttcctggagcgggatgctgcactccaaccctggggactatgcctggggtcagacagggcttgatgccattgtaacccagcttttaggacaactggaaaacacaggccctcccccagctgacaaggaaaagatcacatctcttccaacagtgacagtaactcaggaacaagttgatatgggtttagagtgtccagtatgcaaagaagattacacagttgaagaggaagtccggcagttaccttgcaatcacttctttcacagcagttgtattgtgccgtggctagaactgcatgacacatgtcctgtatgtaggaagagcttaaatggtgaggactctactcggcaaagccagagcactgaggcctctgcaagcaacagatttagcaatgacagtcagctacatgaccgatggactttctgaagctaaagaccacacctgaatcagggctgtggtaatcatcttaccatagctgtaaattgtatcaaaacaaaaaattagtagatggatttaggaatatgtaagaaactcaacacataatataaatgcaatgaatgtttttcttctttaaatttaaagttagtatctacagatggaattgtatctacaaccaaatgcctcttatccctgaattcagagtgataattttataagtgtgaaacttaattatgtagggctccccccgtctgaatagaattaattccttaaagtctagttagggtcctgctgtctgtcatgttgccttgtaacggatgtttccacctccttctccaacctctaccccaccattagtgtattttactataaaaacagtggaaccacagccctaaagtcctgctgatataaagtccttttgtcttaattgtattt

SEQ ID NO: 567 - DNA, 1203 bp, Homo sapiens
tcagcttagttctatgcattgctctataacacacctagttaagttttatgttattcttgaactgtgattttttttctatttactttcatggtttggtgggccattgttatggactgaatgtttgtgtcccacccttcacccccaaattcccgtgttgaagccccaacctgcactgtggagctggggctgctaaggaagtaattaaggttacatgaagtcatggtggggctctgatctgctaaggttggtgtccttatagggagagaccccagagagcttgttccctccctccctgtgcatgcaaacaagagggcatgggagcacacagagagatggcagccacctacaagccaagaggagaagcctcacaatcaaactctcgctgctggcgagagtcttggactctgtcttggacttccagcctccagactgtgagaaacaaatttctgttgtttcagcttctcagtctctggtgttttgttattgcagcctgagaacacagctgtacgattatttgtcaaacagaaaacactgatacttaacaatgctaatgcaattatttatttgcttttcagtctctacaaaacgttctaaaacactaatctaaatattaacagtaaaatatttgcataactaatggaaactaagaaatcatatgaccaatatttcacttattggtaatcttactctactgatttccccccagactgtgatttttgaacttccttgcctttctcctgtctttctgtgtttattcatggaattccagttatctgggcttgaaattgcaggctctcctaacttaagcaaaatctgacagatcagcaaaatgagataaatgtttcttttttctttctgactgcattaaatcagatacaactcagcattaaaaagctatctttgtaaatgttgttactaataaattagtcttataagatccctggactttggagttgttgcaatgtctttgagagtaattctttaaaagtctaatttcgactggttgtatctctttatgatttattgccccactaacaatatttgaaacaatataatattttaaaatgtataaataattatgaatttttgtttagaacaaagaggattactgatatttgtttccctatgaatggcaaaaggtttagcttactactgcatttctgttttaaataaaaagttgagagtttgtgtctcattaaactg

SEQ ID NO: 568 - DNA, 1220 bp, Homo sapiens
cacaaaatggtataaaggactatgtttattagaacaaattgattcctttaagcctccccagcgatctattgacaaaccttttagattatgtgtgtccgatgttttcaaagatcaaggatctggattttgcataactggtaaaatagaagctggttatatccaaactggtgaccgactactggcaatgcctcctaatgaaacttgtaccgtgaaaggaatcactctgcatgatgaacctgtcgactgggcggcagcaggcgatcatgttagtcttactttggttgggatggatatcatcaaaatcaatgttggctgcatattttgtggccccaaagtacccattaaagcttgcactcgtttcagagcccgaatcctcatctttaatattgaaattcctatcactaaaggatttcctgtttttgactaaaggccagaatgcattggtagagctacagacacaaagaccaatagctcttgagctatataaagactttaaagagctggggaggttcatgctacgttacggtggttctacaatagctgctggtgttgtcactgagataaaagaatgatgggtcagaatttctaccacgtttctggatacagtgaaatagctaacctctgtttcaagaatgcagttattaagtcaaaggaacaatgtgcaattgatatgtttttagatgagagagaaaaattaaagctaaaattagctgcaaagaagtattaataatcacctctgcaaaaattctaagttgccagctggcaaagaaagtctaatgttaaaaacaactttgcctttgaaacgttaataaatggatttactttgctaagatttatggcaagtgtcaaaaatagtatctgaagatactgaatcatcatgaaatgaactctacttctggccaaagcacaatgtatttgcagttttctcttttgattcaattatactgcacatgttttaaggaaaagtaacttaattgggtttttcaggcagttgatatttgacctaagcttttttttttttttttttccagttaatgctaagaaaagatttggggaaggttataataaaagtattttgtggtgaccataagaatgtccctccccaaacaagtaaacttgtgaaagtttaatttggaattagtggaagctgttcctttgaaagccaagatattatttaagttgtaaagccagctaataaaatgccttagtttgagcataat

SEQ ID NO: 569 - DNA, 2515 bp, Homo sapiens
acaactcgtaggtttagatttagttacattgggtgaaaagagctttgtcctttgtggagaaaccagtgtttcatgccagaggaaggcaactgagaccacactagatgattccctctgtgttgaatccctccccacctgcgcgacctcagctctcttgcagcccaagctctacgtgggaaagactgtggcttggaaacggcagctgctctagaattctttggctcgtggccacatcctttattggaagatgctacaggttgtccacagttctctccagagcctcggggcccccgtatgtctgtggggactttgtgaacagatgtcctgccagcggtctgttctgcccttggctgtcctccgccctccgtctgtggctgcccggctgggccgggtgggaagtaccctgcgcgtgcttttgttttccagtgctgctcctggcatacatgaaagggaacgccaacttgtgccgcgccatcctccggtcgggggctcgcctcggggtgaataacaaccagggagtcaacatcttcaactaccaggtcgccaccaagcagctcctgttccgactgctgggtgagtggcccgctctctgctctcacagtgcaagcacagtcgtagtgttgggatcgccacgtattgtatgggtgatctttcaatctcatgatgccttaggatcggaaccgctcgtttcctggcagtagctgggaccatttctctgaataagggaaggacttttgagcgtgttgggaaggtcactgtgaacagtctcttttcaaagcactctgccttgtgcatttcccacaccccacaaccttctagaaatgccaaagctccaggcaggccacccttcctgtgtgtcctggccacttacctgcacacctgtcctcttgagactgactcagatcctccagaaccttcaaaatggcctgctgctccagcccctatcagctctccttcccctgtgacccttttgtggaaaggagtgcttccctcctgatttcatatttgtgaatctttactcttccctgctgaggtgacagaaagaatcagaatgtctcgagtgcctgtgctgtgtcatcacccacagtggggagagacaggcaggaaaacaagctccgacatccccggtagccatgggatggcgatgcacaggacctgcccagggggcacagctggtctgtggcggagtcgggttgaaggacagcatttgtgacatctggtctactgcaccttccctctgccgtgcacttggcctttgaaaagctcagcaccggtgcccatcacagggccggcagcacacacatcccattactcagaaggaactgacggactcacgtgctgctccgtccccatgagctcagtggacctgtctatgtagagcagtcagacagtgcctgggatagagtgagagttcagccagtaaatccaagtgattgtcattcctgtctgcattagtaactcccaacctagatgtgaaaactagttctttctcataggttgctctgcccatggtcccactgcagacccaggcactctccggaagcctggaaatcacccgtgtcttctgcctgctcccgctcacatcccacacttgtgttcagtcactgagttacagattttgcctcctcaatttctcttgtcttagtcccatcctctgttcccctggccagtttgtctagctgtgtggtctctgttctctccctaccgtgccttccatcccagccatccctgactacgtgtttcccccacagacatcacactggttcacctcgttgaccaccgtttccttctccccaagtctcccgggcaagggctgattctccagtctcctctgggaagctggccctgaaccacttagaacctatcgctccttcgtcacctatgtcatgtggcagcgctgcctcacttacgggtctgtgttcctgctgcctccaagccctggggcttgcgtggcgccgtcgcggtttgacgggaccgggcctcccccctgtgttgcagatatgctgtccaaggagcctccgtggtgtgacggctcctactgctatgagtgcactgccaggttcggagtcaccactcgcaaacaccactggtaagaccccagcgtcactggcaaggagcgaggggactgccgctgatgtcattgcttccccccttctccaggacaggccgtgaacttgcctgggtcctgcacattgatgggcaaaccttgaccaaatggagggatgagatgagcacacccaaggatcctactgaggaacagagatgtagggaaggcagggagcctgcagacgggtggctttcctgctggaggctgaaggtgcacagtttccaggcagcctgccaggcctgtgccatccttcctgacttcctgcctgcaccaaaggtgagatgagctactgccctcatggtgtgcctcagtatgggccgctttgccgagaactaaggggctgttcccattaaaatgggattacaggcgtgagccaccatgcctggcctgagctgctcttgatcttcc

SEQ ID NO: 570 - DNA, 1928 bp, Homo sapiens
  misc_feature 1619: n = a,c,g, or t
atgaagatcacagtggtgatgataaagtcttcctggactgcttctgtaaaatagctgctggcatcaagaacaacagcaatgggcaccagctgaaggatctgattctccagaaggggatcacccagaatgcacttgactacatgaaaaagcacatccctagcgccaagaatttggatgccgacatctggaaaaagtttttgtctcgcccagccttgccatttatcctaaggctgcttcggggcctggccatccagcaccctggcacccaggttctgattggaactgattccatcccgaacctgcataagctggagcaggtgtccagtgatgagggcattgggaccttggcagagaacctgctggaagccctgcgggaacaccctgacgtaaacaagaagattgacgcagcccgcagggagacccgggcagagaagaaacgcatggccatggcaatgaggcagaaggccctgggcaccctgggcatgacgacaaatgaaaagggccaggtcgtgaccaagacagcactcctgaagcagatggaagagctgatcgaagagcctggcctcacgtgctgcatctgcagggagggatacaagttccagcccacaaaggtcctgggcatttataccttcacgaagcgggtagccttggaggagttggagaataagccccggaaacagcagggctacagcaccgtgtcccacttcaacattgtgcactacgactgccatctggctgccgtcaggttggctcgaggccgggaagagtgggagagtgccgccctgcagaatgccaacaccaagtgcaacgggctccttccggtctggggacctcatgtccctgaatcagcttttgccacttgcttggcaagacacaacacttacctccaggaatgtacaggccagcgggagcccacgtatcagctcaacatccacgacatcaaactgctcttcctgcgcttcgccatggagcagtcgttcagcgcagacacttgcgggggcggccgggagagcaacatccacctgatcccgtacatcattcacactgtgctttacgtcctgaacacaacccgagcaacttccgagaagagaagaactccaaggctttctggaacagcccaaggagaagtggtggagagtgccttgaagtggacggccctactatttcacagtcttggccttcacatcctgccccctgagcagtggagagccacacgtgtggaaatcttgcggaggctgttggtgacttcgcaggctcgggcagtggctccaggtggagccaccaggctgacagataaggcagtgaaggactattccgcttaccgttcttcccttctcttttgggccctcgtcgatctcatttacaacatgtttaagaaggtgcctaccagtaacacagagggaggctggtcgtgctctctcgctgagtacatccgccacaacgacatgcccatctacgaagctgccgacaaagccctgaaaaccttccaggaggagttcatgccagtggagaccttctcagagttcctagatgtggccggtcttttatcagaaatcaccgatccagagagcttcctgaaggacctgttgaactcagtcccctgaccaccacacagcagntgcggcggcgaagatgaagatggcttgccttccaccctctgttctccctccttgtgcattaagttccctccgcgggatgctgcattgttaccccgccctcccctctctcatttttcttggtgtggcttggggtttttaggcttcctgttttatctcgtgtgtgtggtgcaccagctatgaggttgtctgtaacccaagccatcaaagggcctgtacatacctaggagccatgagttgtcccggccagcttcatactggagtgtgcacatcttgagaaataaacaagtgacttaacacacattgaaaagg

SEQ ID NO: 571 - DNA, 1414 bp, Homo sapiens
gccaagttcgatggcatcctgggcatggcctacccccgcatctccgtcaacaacgtgctgcccgtcttcgacaacctgatgcagcagaagctggtggaccagaacatcttctccttctacctgagcagggacccagatgcgcagcctgggggtgagctgatgctgggtggcacagactccaagtattacaagggttctctgtcctacctgaatgtcacccgcaaggcctactggcaggtccacctggaccaggtggaggtggccagcgggctgaccctgtgcaaggagggctgtgaggccattgtggacacaggcacttccctcatggtgggcccggtggatgaggtgcgcgagctgcagaaggccatcggggccgtgccgctgattcagggcgagtacatgatcccctgtgagaaggtgtccaccctgcccgcgatcacactgaagctgggaggcaaaggctacaagctgtccccagaggactacacgctcaaggtgtcgcaggccgggaagaccctctgcctgagcggcttcatgggcatggacatcccgccacccagcgggccactctggatcctgggcgacgtcttcatcggcgcgctactacactgtgtttgaccgtgacaacaacagggtgggcttcgccagaggctgcccgcttctagttcccaaggcgtgccgggcgccagcacagaaacagaggagagtcccagaggaggaggcctctggccgaggggcccttcccacacacaccgacagagtcgcccgcgcactgtcctgggcgccttggaagccgggcgggccaaggccagactgggtgttttgttatgtggttttcccctcctcgggttcagaaatgctgcgtgcctgtctgtctctccatctgtttggtgggggtagagctgatccagagcacagatctgtttggtgcattggaagaccccacccaagcttggcagccgagctggtgtatcgtggggctcccttcatctccagggagtcccctcccgggccctaccagcgccggttgggctgagcccataccccacaccaggcgtctcccgggccctcccttggaaacctgccctgcctgagggcccctctgcccagcttgggcccagctgggctctgccaccctacctgttcagtgtcccgggcccgttgaggatgaggccgctagaggcctgaggatgagctggaaggagtgagaggggacaaaacccaccttgttggagcctgcagggtggtgctgggactgagccagtcccaggggcatgtattggcctggaggtggggttgggattgggggctggtgccagccttcttctgcagctgacctctgttgtcttccccttgggcggctgagagccccagctgacatggaaatacagttgttggcttccggcctcccctc

SEQ ID NO: 572 - DNA, 1031 bp, Homo sapiens
gctccgcatgtgaacccagctttctttcctccaccaactaacagtggcatgcctacatcagatagccgaggtccaccaccaacagatccatatgggcgacctccaccatatgataggggtgactatggcccccctggaagggaaatggatactgcaagaacgccattgagtgaagctgaatttgaagaaatcatgaatagaaatagggcaatctcaagcagtgctatttcgagagctgtgtctgatgccagtgctggtgattatgggagtgctattgagacactggtaactgcaatttctttaattaaacaatccaaagtatctgctgatgatcgttgcaaagttcttattagttctttgcaagattgccttcatggaattgagtccaagtctatggttctggatcaagacgtgaacgatcaagagagagggaccatagtagatcacgagaaaagagtcgacgtcctaaatcccggtagtagagaccgtcatgacgattattttccgagaggagaagcagagaacgagagaggcaccgggatcgtgaccgagaccgtgaccgagagcgtgaccgagaggcgcgaatatcgtcatcgttagaagctgaaggaagaggatcaccttccaagacaaaacagtcttcatgggggaaaaatgacgcttgtccagcagtttgcttcttgtgattgaactgaacctgtaaggattcatggataaaatgaacaggaatagatctgaataaagcaaatctgcataaatggtaaccagtagctctacttttattttttatgttgcttaactgttttatttgaaggaaacctgtgtgatttaaaaagttatagcttttgcaactttattactggttatatacatttggccattatgatgtgcaagcaattggaaaaaaagtcaagtaaatgcttgtttttgtagtagtttgttcttgttaaaaatgtttatatgataatgtctgtaaacagcatcactttgattacaatagatgtagtgttgtaataaactgtttaatgggg

SEQ ID NO: 573 - DNA, 2069 bp, Homo sapiens
gtgagaggaaagggaaggaggaggtcccgaatagcggtcgccgaaatgttccggtgtggaggcctggcggcgggtgctttgaagcagaagctggtgcccttggtgcggaccgtgtgcgtccgaagcccgaggcagaggaaccggctcccaggcaacttgttccagcgatggcatgttcctctagaactccagatgacaagacaaatggctagctctggtgcatcagggggcaaaatcgataattctgtgttagtccttattgtgggcttatcaacagtaggagctggtgcctatgcctacaagactatgaaagaggacgaaaaaagatacaatgaaagaatttcagggttagggctgacaccagaacagaaacagaaaaaggccgcgttatctgcttcagaaggagaggaagttcctcaagacaaggcgccaagtcatgttcctttcctgctaattggtggaggcacagctgcttttgctgcagccagatccatccgggctcgggatcctggggccagggtactgattgtatctgaagatcctgagctgccgtacatgcgacctcctctttcaaagaactgtggttttcagatgaccaaatgtcacaaagacactgcgattcaaacagtggaatggaaaagagagaagcatatatttccagccaccttctttctatgtctctgctcaggacctgcctcatattgagaatggtggtgtggctgtcctcactgggaagaaggtagtacagctggatgtgagagacacacatggtgaaacttaatgatggctctcaaataacctatgaaaagtgcttgattgcaacaggaggttctcccagaatctgtctgccattgatagggctggagcacgaagtgaagagtagaacaacgcttttcagaaagattggagactttagaagcttggagaagatttcacgggaagtcaaatcaattacgattatcggtggggcttccttggtagcgaactggcctgtgctcttggcagaaaggctcgagccttgggcacagaagtgattcaatctccccgagaaaggaaatatgggaaagatcctccccgaatacttcagcaactggaccatggaaaaagtcagacgagaggggttaaggtgatgcccaatgctattgtgcaatccgttggagtcagcagtggcaagttacttatcaagctgaaagacggcaggaaggtagaaactgaccacatagtggcagctgtgggcctggagcccaatgttgagttggccaagactggtggcctggaaatagactcagattttggtggcttccgggtaaatgcagagctacaagcacgctctaacatctgggtggcaggagatgctgcatgcttctacgatataaagttgggaaggaggcgggtagagcaccatgatcacgctgttgtgagtggaagattggctggagaaaatatgactggagctgctaagccgtactggcatcagtcaatgttctggagtgatttgggccccgatgttggctatgaagctattggtcttgtggacagtagtttgcccacagttggtgtttttgcaaaagcaactgcacaagacaaccccaaatctgccacagagcagtcaggaactggtatccgatcagagagtgagacagagtccgaggcctcagaaattactattcctcccagcaccccggcagttccacaggctcccgtccagggggaggactacggcaaaggtgtcatcttctacctcagggacaaagtggtcgtggggattgtgctatggaacatctttaaccgaatgccaatagcaaggaagatcattaaggacggtgagcagcatgaagatctcaatgaagtagccaaactattcaacattcatgaagactgaagccccacagtggaattggcaaacccactgcagcccctgagaggaggtcgaatgggtaaaggagcatttttttattcagcagactttctctgtgtatgagtgtgaatgatcaagtcctttgtgaatattttcaactatgtaggtaaattcttaatgttcacatagtgaaataaattctgattcttct

SEQ ID NO: 574 - DNA, 1902 bp, Homo sapiens
gacgtggagtgcaggtaatgcatgtccatggtacacaaattcacaagtttggagaccctgacacacccaccttctcacctgggctctgcgtatcccccagccttgagggaagatgaagcctaaactgatgtaccaggagctgaaggtgcctgcagaggagcccgccaatgagctgcccatgaatgagattgaggcgtggaaggctgcggaaaagaaagcccgctgggtcctgctggtcctcattctggcggttgtgggcttcggagccctgatgactcagctgtttctatgggaatacggcgacttgcatctctttgggcccaaccagcgcccagccccctgctatgacccttgcgaagcagtgctggtggaaagcattcctgagggcctggacttccccaatgcctccacggggaacccttccaccagccaggcctggcttgggcctgctcgccggtgcgcacagcagcctgaacatcgcctccttctactggaccctcaccaacaatgacacccacacgcaggagccctctgcccagcagggtgaggaggtcctccggcagctgcagaccctggcaccaaagggcgtgaacgtccgcatcgctgtgagcaagcccagcgggccccagccacaggcggacctgcaggctctgctgcagagcggtgcccaagtccgcatggtggacatgcacaagctgacccatggcgtcctgcataccaagttctgggtggtggaccagacccacttctacctgggcagtgccaacatggactggcgttcactgacccaggtcaaggagctgggcgtggtcatgtacaactgcagctgcctggctcgagacctgaccaagatctttgaggcctactggtccctgggccacgcaggcagctccatctcatcaacttggccccggttctatgacacccgctacaaccaagagacaccaatggagatctgcctcaatggaacccctgctctggcctacctggcgagtgcgcccccacccctgtgtccaagtggccgcactccagacctgaaggctctactcaacgtggtggacaatgcccggagtttcatctacgtcgctgtcatgaactacctgcccactctggagttctcccaccctcacaggttctggcctgccattgacgatgggctgcggcgggccacctacgagcgtggcgtcaaggtgcgcctgctcatcagctgctggggacactcggagccatccatgcgggccttcctgctctctctggctgccgtgcgtgacaaccatacccactctgacatccaggtgaaactctttgtggtccccgcggatgaggcccaggctcgaatcccatatgcccgtgtcaaccacaacaagtacatggtgactgaacgcgccacttacatcggaacctccaactggtcgtgccaactacttcagcggagacggcgggcacctcgctgctggtgacgcagaatgggaggggcggcccgcggagccagctggaggccattttgcctgagggaactgggactccccttacagccatgaccttgacacctcagctgaacagcgtgggcaaacgcctgccgcctgcctctgaggcccgatccagtgggcaggccaaggcctgctgggcccccgcggacccaggtgctctgggtcacggtccctgtccccgcacccccgcttctgtctgccccattgtggctcctcaggctctctcccctgctctcccacctctacctccacccccaccggcctgacgctgtggccccgggaaccagcagagctgggggagggatcagcccccaaagaaatgggggtgcatgctgggcctggccccctggcccacccccactttccagggcaaaaagggcccagggttataataagtaaataacttgtctgt

SEQ ID NO: 575 - DNA, 1222 bp, Homo sapiens
cagccctcaggcagcccctccacagggcccctctcctgcctggacagctctgctggtctccccgtcccctggagaagaacaaggccatgggtcggcccctgctgctgcccctgctgctcctgctgcagccgccagcatttctgcagcctggtggctccacaggatctggtccaagctacctttatggggtcactcaaccaaaacacctctcagcctccatgggtggctctgtggaaatccccttctccttctattacccctgggagttagccatagttcccaacgtgagaatatcctggagacggggccacttccacgggcagtccttctacagcacaaggccgccttccattcacaaggattatgtgaaccggctctttctgaactggacagagggtcaggagagcggcttcctcaggatctcaaacctgcggaaggaggaccagtctgtgtatttctgccgagtcgagctggacacccggagatcagggaggcagcagttgcagtccatcaaggggaccaaactcaccatcacccaggctgtcacaaccaccaccacctggaggcccagcagcacaaccaccatagccggcctcagggtcacagaaagcaaagggcactcagaatcatggcacctaagtctggacactgccatcagggttgcattggctgtcgctgtgctcaaaactgtcattttgggactgctgtgcctcctcctcctgtggtggaggagaaggaaaggtgccagggcgccaagcagtgacttctgaccaacagagtgtggggagaatggatgtgtattatccccggaggagttgatgtgagacccgcttgtgagtcctccgaactcgttccccattggcaagatacatggagagcaccctgaggacctttaaaaggcaaagccgcaaggcacgaaggaggctgggtccctgaatcaccgactggaggagagttacctacaagagccttcatccaggagcatccacactgcaatgatataggaatgaggtctgaactccactgaattaaaccactggcatttgggggctgtttattatagcagtgcaaagagttcctttatcctccccaaggatggaaaaatacaatttattttgcttaccatacaccccttttctcctcgtccacattttccaatctgtatggtggctgtcttctatggcagaaggttttggggaataaatagcgtgaaatgctgctg

SEQ ID NO: 576 - DNA, 1348 bp, Homo sapiens
tttttttttttaatttcttagtcgtttggaatccttaagcatgcaaaagctttgaacagaagggttcacaaaggaaccagggttgtcttatggcatccagttaagccagagctgggaatgcctctgggtcatccacatcaggagcagaagcacttgacttgtcggtcctgctgccacggtttgggcgcccaccacgcccacgtccacctcgtcctcccctgccgccacgtcctgggcggccaaggtctccaaaattgatctccagctgagacgttatatcatttgctggcttccggaaatgatggtccataaccgaatcttcagcatgagcctcttcactctttgatttatgaagaacaaatcccttcttccactgcccatcagcaccttcatttggttttcggatatcaaattctacttttgcccggtccttatcttgaatagccttccactcatccaaagtcatctctttaggaccctcctcttttacctcttcaacttcattctccttattttcagtgtctgccactggatgatgttcttcaccttcaggtgtttcctcagtcacatttgattgatccaagtcagttaattcgtctttgacagttccccagttgtgagatccgctacctccacgtttgtcctcgtgcttcaggccactgtaatgtgaaaaagaagatctatcacttccactatgcctatcaaattcacgtttgccacgagaatcaaatccatctcctcggcccattccacgtccacggccccctcgacctcttccaagaccaccacgacctcgaataggtcggtcaataatcggtctatcaactgaaaattcgcctccttcacccttttcttcaagtggcttttcgaatcttcgttcacgaggtggtcgcctttctggtcttctatcaattattttcccttcaccctgaagttgttgatcaggtcttcttccaactcgtcttattccttctttcttaagcgccacgggcggctgcgtctcctctttcttgtcaaccacgccaacgctggggggcagcgggttcttgcggtctttctgggactccttgcgcagctgtttgcctgccgcgttggagttggtctgggccgcggcctgagctgcgctcttggccccagggcccccaacgccgcccccgccggcttcttttttcttgttctctgctgccttcagcacctcgaaggggtccgattcgtcctcaaataactggtcgaatcggttggtgacacgcagccgaagccttcctgtaagtgcccaggcatgatggtggctcggcggcgcgttcctccacggatgcaacggcgcgccgagccaagagcgcctgcttca

SEQ ID NO: 577 - DNA, 1055 bp, Homo sapiens
ttttttagaatttatttttattctttcagacctctcagggatgaacggacataggcttctaacacttaggtgtgggcaacattcttcgaagcacctccctcaaagtggaaaaggcctgggggctcagacgagagaagagagaaggcagggagaaggtggaggtgaggaagggaggagggggcccagggctcagtggggtgttggggagggtgggattccaccggggtttgcccatccacagctcagtggggggatctatggagtgtgtctagcaagagaggacccatggcaggcttggtaactaacatcatgcagtagcttcttctattctctcttatttttttggaaacggagtctcgctcttgttgcccaggctggagtacagtggcacaatctcagctcactgcaacctctgcctcccaggttcaagtaattctcctgcctcagcctcctgagtagctgggatcacaggtgggcaccaccactgtgcccgtctgatttttgtatttttcatagagatggggtttcaccacgttgggcaggctggtctcaaactcctgtcctcaggtgttctgctcaccttgacctcccaaaagtgctgggattaggggcatgagccacagtgcctggcctattattctctttttatttttattttttcatatttttcccttatattttgttttctttgctttttaaaaatcttttttactcctcactgacttgaagctcaaaactttcctatttagcttctaatcacacactctctcttttttttttttttttttgagaaggggtctcactgtgttgccctggctggtcggtctcaaacctctggcctcaagccatcctcccatctcatccttcccaatagctgggatacaagtatgggccatcatgcctgagtaaattcttaaaaatgctttctgaatggatggacggaagtatgaatgaatggcgaagtgaatgaaggaatcaacttctcttctcctagtgggtgtgtgtgggcacagcacgctgaccccttctcaaaaaaaaataggcctctttggccg

SEQ ID NO: 578 - DNA, 929 bp, Homo sapiens
gttgaaaatcaattgtaaagtcatgggttcatttttgagttctctatttgtttcattggctgacgtgtctatttttatggcaataccacactggtttaattactatagctttgtaaaatagtttaaaatcaggtagtgtgatgctctgctttgttattttcctcaagattagcttggctgttcaggtttttttgtggttctatatgaattgcaggatcatttcttcaatttctgtgaacagttactataattttagaaggtattgcattgaatctgcaaatgtatgctttgagtagcaatgacatttcaaccacattaattcttgcaattaacaaacatgaaataacttttcatttatttgtgttattgtcttcaatttccttcattaatgttttatagattttagtgtatagatctttcatctccttggttagatttattcctaagtatcctctttttatgtagctattgtaaatgagagattgttttcataatttcttttttggatagtttgctgttagtatataggacatcagttatttttgtgtgttgatttcgtattctgcaactttatttaatttatcatgtcatcattttttgtggagtatttagggttttctatatataagatcatgtcatctccaaacagggactatttagttttcctttccaattggaatactcttatttgttttcctcacctaattgctctggtaagatcttccaatactatattgaatagaagcagtgagggtaggcataattatcttattcctttgaggaaaacatttccactttttactattgtgcttaatgtcagctgagggcttgtcatatatatccttcactgtgttgagatacatttcttttgtacctagttgattgagagtacttatcatgaaaagatgttgaaatttgtcaaatcctgc

SEQ ID NO: 579 - DNA, 1536 bp, Homo sapiens
  misc_feature 207,211,212: n = a,c,g, or t
caatgcatggagcaggagatgcaaaaccgatacccacctgtatcagttctgctacaggtttgatagaaaatcgccctcagtcaccagctacaggcagaacacctgtgtttgtgagccccactcccccacctcctccaccacctcttccatctgccttgtcaacttcctcattaagagcttcaatgacttcaactcctccccctccantaanntcccccacctccacctccagccactgctttgcaagctccagcagtaccaccacctccagctcctcttcagattgcccctggagttcttcacccagctcctcctccaattgcacctcctctagtacagccctctccaccagtagctagagctgccccagtatgtgagactgtaccagttcatccactcccacaaggtgaagttcaggggctgcctccacccccaccaccgcctcctctgcctccacctggcattcgaccatcatcacctgtcacagttacagctcttgctcatcctccctctgggctacatccaactccatctactgccccaggtccccatgttccattaatgcctccatctcctccatcacaagttatacctgcttctgagccaaagcgccatccatcaaccctacctgtaatcagtgatgccaggagtgtgctactggaagcaatacgaaaaggtattcagctacgcaaagtagaagagcagcgtgaacaggaagctaagcatgaacgcattgaaaacgatgttgccaccatcctgtctcgccgtattgctgttgaatatagtgattcggaagatgattcagaatttgatgaagtagattggttggagtaagaaaaatgcattgataaatattacaaaactgaatgcaaatgtcctttgtggtgcttgttccttgaaaatgtttggtcattctagtgttttgctttcttttccttataataaatgacccttttcctccataacttttgatttctaaggaaaatattagcatacatttcaaactaaatgttttacagtggcttatcttttttttccccctgaaaagactaatttggtcaaataaaccactaagtattaagcatggacagctgttgttagagtagcagattcagttttttgatatatcttaattgtgtactttgtgaattttaatttaaagaaagcaactgaaattgaaatcttgagggcagctgtatctactaatgagccttattccatttcctgatgttttaaaagaagaaacactgccttgattatacgaatacactcagaaagtacatttagcttgtagtgttgaattctcttaaaggaatgcttgaattttttcattattgttttattgtttttatatacttgccttatttgaatgtttagcagtatccccttcccacttatatattgtgtgatatgattttgcttgcctataggagtaaaaacttttccatgtgaaatactctgacttaaacatacatgtaacttacataactgttaagaataacagtctgatttaataaatggttcattttaaaagtt

SEQ ID NO: 580 - DNA, 1521 bp, Homo sapiens
  misc_feature 381,959,1073: n = a,c,g, or t
ctacatttgtcaggcttttatcattcaccaaaagacttgttttaaaggtatgtggagcataataataatgctgaaatggtaagacacattcccatttattttgattcctaaacaatcagaatgaaaaaatacagtatggtacaggtgacttgtatcacttcaaaccataattagccactctaagcttcgggacagtgtaagttcttcccaaaaagagataaacaggcattctattgaatctcatccccgtttcagactatatcagtgcttgtatgggatgtggaagatgtttttgtatgtcacgtgtattctgtatttattgagatatgtgttatacacacagagaatatttgcattttttgtattcccagcagcttcccnagagcagtgttgggcatagcacaattgataaacgctaattgaattaataccattagatgtattgctttaataactaatgacagttctcatttattggtgcttagcttgcaccagacgctttacacacattatctcatttaatcctcacactaaccatggaaaataggtgatgctatgcccatttaaagataaggaaagaggctgggcatggtggcacacgcctgtaatcccagcactcacggaggccaagatgggcagatcacttgaggttaggagttcaagaccaggctggccaacatggtgaaaccccatctctactgaaaatacaaaaattagccaggtgaggtggcaggtgcctgtaatcccagctactcaggaggctgagccatgagaatcacccgaacccaggggaggaggctgcagtgagacaatatctcgccactgcattccagcctgggcaacagagtgagactctatctctaaataaataaataaaaataaagataagagactcagagggattgctatttggccacggtgtcttgctgctgagtggcagagccagtattcaagaccangaccctgttcaactccaaagcccatgttcttttcactctgtctttaaacaattatgtataagcaccatatttcatatcagtgcttactaagtaaatatccggagaacattttcntgatgttctcaattagtaggaatcagaatctttgtcatgaaaaactatgacaaataatctgtgagccctcactggagggatcattttcaatgacgatgatgctcctagcagtgtgcatgtttatcagattattttatttaatcttcatgtcaaacgctaccaaggaattgaagttttgtgaaggtaaataaattgcaagcaatccacttgcaaagggtcgcctaagtaagtacccaagcaacatctgaactcagacagccttcctctaaggctagtattattaggcactgaattatattattggattataatattataatgtggacacctcattagtacagattgatctttatttcaaagtcatatcaatccacaattttaggtaccctgttaaaagtacaggtactgtattaccacattttagagagtattttttgtggttttcctt

SEQ ID NO: 581 - DNA, 969 bp, Homo sapiens
  misc_feature 430,434,484: n = a,c,g, or t
aattttttaatgaccagactgctttgaggatttgaagttgactttatagagcctacaaaaagcctgttggaaaaattagcctgataccttgtctacacagtttccttacaaggttcctgaccttgcggtagtaaagaatgtcactctctggcaggcccaggagcctcaggatattttgggaaccttgacaagagaggagtgtatccaatttatacaggaattacaagtgcagtctgattgtgaatccttgtcttggcttcttagccttgagagtttttaaaagttgaatgtgaaattccttatgaaaaagttccaacaaagccaaactttaaaagagcctatatgtggtcaatcactatttttgctgtactttatgcaaataatcaggccaaatataataaaactaaaacttattttgcaaataaattgntccngttatgatttgcctttaatagaaaagggggactggagagagaagaattangtttcagaagaaaatgatagcatacctgttgttagattctagctttgtccattgtttttaagttgtaattatttgcctacatttgaactaaatcttgaattctttcctggctacaagtctccaagctaacatttaaatttttttctcctatgtttctgacttggaataagtagaagttaaaactatgcttttcttgaagccctgcagactggagcaagacaacttgaataaactatgggaaaaatcactacagcaacttatatataaacagcttttatgctttgttgatgtatggaatactcagaaagttcactgcaacacctgatttaaactacaaccaggagactctgtcagattaacactacaatctgaagaactacagagactctcaaaaaactagtctatagtctacagtagatattaacctttgtttttcttctgttttcatagaaacaccttttattaaaaatctgtttgccgcttcc

SEQ ID NO: 582 - DNA, 1241 bp, Homo sapiens
gcctggcagtgcagtggggaacttcctgtgtgccttctatcctgatgacaccccctcactgaaatcctggtgttgtttccacagagctgtctggccttttgtccttgatccttggttaaggaaatgaccaaccagtacggtattctcttcaaacaagagcaagcccatgatgatgccatttggtcagttgcttgggggacaaacaagaaggaaaactctgagacagtggtcacaggctccctagatgacctggtgaaggtctggaaatggcgtgatgagaggctggacctacagtggagtctggagggacatcagctgggagtggtgtctgtggacatcagccacaccctgcccattgctgcatccagctctcttgatgctcatattcctctttgggacttggaaaatggcaaacagataaagtccatagatgcaggacctgtggatgcctggactttggccttttctcctgattcccagtatctggccacaggaactcatgtcgggaaagtgaacatttttggtgtggaaagtgggaaaaaggaatattctttggacacgagaggaaaattcattcttagtattgcatatagtcctgatgggaaatacctagccagtggagccatagatggaatcatcaatatttttgatattgcaactggaaaacttctgcataccctggaaggccatgccatgcccattcgctccttgaccttttccccggactcccagctccttgtcactgcttcagatgatggctacatcaagatctatgatgtacaacatgccaatttggctggcacgctgagcggccatgcctcctgggtgctgaacgttgcattctgtcctgatgacactcactttgtttccagttcgtctgacaaaagtgtaaaagtttgggatgttggaacgaggacttgtgttcacaccttctttgatcaccaggatcaggtctggggagtaaaatacaatggaaatggttcaaaaattgtgtctgttggagatgaccaggaaattcacatctatgattgtccaatttaaacatcaaagtctccaggcttatgctgcaaagagaatgtacggattgatcatgacattccttaccttcttaggcttgtttaaaagaaatatagcatttattgtagcaaagacttaaattttgtagatacaatatgaatcttttcatgttttattggaaatgctgttcatactttaacgtaaagctttcttaatgcaaacac

SEQ ID NO: 583 - DNA, 1496 bp, Homo sapiens
  misc_feature 1295: n = a,c,g, or t
gtgacgtcagaatcaccatggccagctatccttaccggcagggctgcccaggagctgcaggacaagcaccaggagcccctccgggtagctactaccctggaccccccaatagtggagggcagtatggtagtgggctaccccctggtggtggttatgggggtcctgcccctggagggccttatggaccaccagctggtggagggccctatggacaccccaatcctgggatgttcccctctggaactccaggaggaccatatggcggtgcagctcccgggggcccctatggtcagccacctccaagttcctacggtgcccagcagcctgggctttatggacagggtggcgcccctcccaatgtggatcctgaggcctactcctggttccagtcggtggactcagatcacagtggctatatctccatgaaggagctaaagcaggccctggtcaactgcaattggtcttcattcaatgatgagacctgcctcatgatgataaacatgtttgacaagaccaagtcaggccgcatcgatgtctacggcttctcagccctgtggaaattcatccagcagtggaagaacctcttccagcagtatgaccgggaccgctcgggctccattagctacacagagctgcagcaagctgcaggtgctgacagaggccttccgggagaaggacacagctgtacaaggcaacatccggctcagcttcgaggacttcgtcaccatgacagcttctcggatgctatgacccaaccatctgtggagagtggagtgcaccagggacctttcctggcttcttagagtgagagaagtatgtggacatctcttcttttcctgtccctctagaagaacattctcccttgcttgatgcaacactgttccaaaagagggtggagagtcctgcatcatagccaccaaatagtgaggaccggggctgaggccacacagataggggcctgatggaggagaggatagaagttgaatgtcctgatggccatgagcagttgagtggcacagcctggcaccaggagcaggtccttgtaatggagttagtgtccagtcagctgagctccaccctgatgccagtggtgagtgttcatcggcctgttaccgttagtacctgtgttccctcaccaggccatcctgtcaaacgagcccattttctccaaagtggaatctgaccaagcatgagagagatctgtctatgggaccagtggcttggattctgccacacccataaatccttgtgtgttaacttctagctgcctggggctggccctgctcagacaaatntgctccctgggcatctttggccaggcttctgccctctgcagctgggacccctcacttgcctgccatgctctggtcggcttcagtctccaggagacagtggtcacctctccctgccaatactttttttaatttgcattttttttcaattggggccaaaagtccagtgaaattgtaagcttcaataaaaggatgaaactctgg

SEQ ID NO: 584 - DNA, 1657 bp, Homo sapiens
ggtgacttttgaaaaaaaaagaaaagaaaaagcagcatccttatatttctttaaaatacatagaaataaagttagtaattaggtaacctatgataacataataatgtggacgcctggggaaaccctcctcatgtttgtcatcttctacctctgccattttcctgcaattccgcttcctacttaggcagttcagagagaacaattctaataaaaacactcctctcctattaacaaaaaatgatgcagtacccatttttcgtatcctgcttttcttatattggagtaaaaaggacagggtatagacatgaatgatgatattctgcctggcctgtcatttcttacctggaaacatttacttaagagtttctgttactttttgttcagatggggatttgctaaaggttctgggaagctaataattgaattattagaaaaacatttcagaataggaagtaaatgataaacttatattctttattattatttagtacaaaaatagattcccagtagatatccacaagcaatattagcagggcttctgtttctaagtgaccacagactaaccctttctaggctttaacattgtaaataatcctataaacagtttgattttttaagatgatttttgatttgaagagacaggctttacataagccttcattccttcaaaaggtcctgacaaaatacttgggtttttttctctttttttcattctggtatgctttgcagcatttcagctgctttggtggggacacagataaccccttcgcttccagctcttaaaattctttatctttttcttggcaaaaccagaattaagaatgtaagatagattccatgtgtgcttatataggtccctgcacagattggacttgaaccaaaattaagtccaaagaacatatgtttagaccaacttcatggaagtggaagatcctgtgctcttgaacttattttaattcttataatttgcacctatataaacaaagctcctactgtattcttctcttcatcaaccttttgtggtgatgggttgccttttctacgagcatttggaaggagtgatcaaataccgaaattgaactttctaaaacctacacatagcatgcgtttaaattctattatataaagccccaagtgctttaccttctaaaacatgcttctctataggtgcaaagttataagatatgtagaagaaaacatccatcagaatcttctggagaatatggtcagagtcttaaacaggcccagtgctgagttctttgtccacttagtcacacatcttttgtgggaatgggaaaggaaggagacagccaaactctgacaaaggcttttccttatagaataacccaaagcctaggtgagggttgatatataatgtcccatgatttaatatatgtggtttgggggaaaggacaagaaaaaactataattccacatataagaaggtagttgcccatttacaagttccagttatgtgtgtaaaacagaaaaattaagtaccaaacctattaggaaatttttttaaaaagtggatttaacttaaattactgtgtacttgaggttggctttggatatggattttctaaaaagtgatgttttattggttatcatctaatggctgtaaactgtagtactagaataaaaaaaatggaaaatc

SEQ ID NO: 585 - DNA, 602 bp, Homo sapiens
gggggatagcaatcactgtgtagaggcagttagaataatattacacctgctgtgatttaagtgagctcaggccctggggaccagggctgaatcctggagggagcagcctccaggccaaggcctgaatctaattgaggttttttttgattgctaaaaccaggtttcttttaaagtctggcaacctctacagtgcttaaaatgagagggtttatttgaatcatgattctgtgatactagagctggaagggaccctaaaacccaatgtcttcaaccccttcctggttcagagaggaaagtaggagcgacagggctagaattcaggactcccacctcccagctcagctcactgtccccacacgccgtccacatagacacagttgccacgtttgattcaacttctctatggtgacttggttactcagagccccttttgtggtgggacccactgtgaccttagctgcccattatgttcctagggcttcgggtctcacctgtgaattgatggcatcctttaaccggtgctttgcaatctctctctttagtccgcaaccatccctctgatcatgcgaaacaaagatgtcgctgcagaatcggtgagtgcc

SEQ ID NO: 586 - DNA, 1271 bp, Homo sapiens
tatcgctggccttcctttcccatcctaaaaacttgccgaggccctatggctccctccctttctttcccaggcagcttcttatctgggctgtctgtaccccttcctttgcaccacccaccatgccccacgtagctgaaagctgcttatcccaattgtcaactctggccttcttcagcctctgtagcaccagacactgcacctcctgaatgtcctctgcttctctgcttcagaggcccaggctcgccagttctctgacctctcccatatgtctgcttaggactctgctgcagctgtcctcaccagcctccggggaatcccactacccacagggcagggctgtgggctgggctgaaaaaccatctgcatggtccacaagaagcctggcactgggtttccccatgaataacaatgaaaattaatggatgcacaaccttcctggaacgtggaatttctctgggagattccatgcagaggccactggggaggtggcaggcatgcatgtgactgtaggtggctgcagtgttggaaggctcccagcagagcagagagggtgtcagtctcatcagggaacccacctgatggcttctcagccagcagtctcagaggaacatagacgactgctgagaaaggagggaggcagcagtggtcccagcacctgaggcatcctgctgtcatgggaaggtctccgcccaaatgtcagatgcatcagcctgtcacccgctggtccagagctttcagctgtactggtagggggtgggtggtggagtgctgaatgaccttcacaggtgggcctttccagctctagggtcttacgggtgtcggtccacagaaccacggtttttaggttgtgtgtccggggctatgggaacctgtcccccatgatggatcttggtagagacacttccctctgtcatcgtgcccaggaggatgctgcaggtgactacctgcagccctgttctcattcatttggatgccctccagaaatctggggagccatacacctttagagccttttttgctccttatcaagttggcaaggcttggcgcaattcctgttcaaggctgcattaaaggcatgttcaccatcctggctaatacggtgaaaccccttctctactaaaaatacaaaaaaattagccgggcttggtggcgggtgcctgtagtcccagctactccggaggctgagagcaggggaatggtgtgaacccaggaggcggagcttgcagtgagccgagatcacaccactgcactccagcctgggctcaaaaaag

SEQ ID NO: 587 - DNA, 935 bp, Homo sapiens
gcagttttgtgaaaagccttcccggtaagaatacaaaagcatctgcaccaaaatatatagatttaatggcatgtaggggtttgcgtgaatatatacagttgaaattcaattcttccttaaaaataattgtaactcatttctttaagactaccatactaccactttcctcaacttggactaatgtccattgtcaaccaaaatgtctgtgatctcatggatccattatgatttgcaactccaggtccattttatgcaaataagacagccataatatatcattgtacaagtcatttactatctaattatatcattgctcaacatttgcaaattatttttacaaataacaataattggatgtaacaaaaagcagagtattttgagacgtatattaatgcaaaatattgttaatgtatcagtggattgttcctccaaagtaccagtgccttaacacaacatatctaaaagaacatctctgggaacagtagtacttaatggcaacttgagaattggtttgtgggcacacagccttgtgaagttttgaatactaaatcccttttttaaaaaagtgcttattatcaggctatcaatcaaaagatttgagtctttcagtaaagaaaatttgcttaattttatctagtgcatgataaactttactaaggaagtctcattcagaatatctaatattttggatgtgagcccacactggaaatgccataaccaaaaaagagtgaccctaaagatagaatattcagatctaatggcagatgcttagctatgctgggaaaggaagtgaattgtatattgctctgctgctcacatattcctctgcaataaattgctggcccagtttagtttttatatactcactactatactaatgaggatgacgatgtcgataccaagaagcagaagaccgacgaggatgactagacagc

SEQ ID NO: 588 - DNA, 1456 bp, Homo sapiens
ccaaaattattttggagctttaattgtaatggcctgataaacatgcttacttgaaggaaaatgaaatgtctacagcgttggccgtttgtccagaggcaaagatgcctctctttcaggcctctcccacatcctttggttcaagttcaagttcatgggttttaccctatggaatcagcaaaaggagcccagagtttgtttcccattgtgacaggatttctgtttgtttttaactagttttagctgctaatcagaaaagctatctgaggggtagatatgttttaaggccagccatcttgttgatctcattggagttctccagtcagaaaatgacatcttctgccaatgaaggtcccctctgtagttctccctcttactataatttttgcaattctacgcttccagaacaggtcagaggaggaaaaaacacaggattaaaagctcaaaaggcatttgatcagatgtaacctcctattcctgattttcaaactattttaataaactaagaaatgcggatctcagcgtccggggcagcagaggggtgaggctgcgggagccccagaggcctggccgtcggcttccttgccagggcccaggcatgcagcaagtgttcaactcccagcccctggaggtgagacggtgtcacctgtggtggtggcacagctattaactgtagttaaaaacagtgaatcatgcggtaatctactgcccaggggagtttgcttataaagccatcttcaggaggctggctgggtgttttttgtttgtttcaagatggtgtcttgccgtgttgcccgggctggagtgcaatagtgcaggcacggctcactgcagcctcaacctcccaagctcaagcgatcctcccacctcagcctcccatgtcgctgggaccagaggtgcatgcaccacacccagttaatttgttaaacagttttgtagagatgggcagggctgggtctcactttgttggctgggcgggtgttgtactcctgggctcacgcactcctcccgatttggcctcccagagtgctgggattataggtgtgagccactgtgtccagccaaggaggctgtttgaactgcattgaaaacacatttgcatatgtagttttagggtattttttaattgcctctggtttgaactgaatggaaaaatcttggctgatttcaatgtatagatctatcaaaagaagtttaaaaggatagtaagatctgttttaaatgtgcacgtgtgtctgaaggctggttaaggaaatcataacagggtttgggaccgattagccagccgttcttcagccccaaggtcctcaaaacactcagatttgaagatgatcccgtcttgttccgtggtctcgtccgctcctccacggtcattcttttcgaacctggccgccagtatgtgccctgagagtctatttctcttgtaaatcattgtaatattcttgactttggtttaaat

SEQ ID NO: 589 - DNA, 2111 bp, Homo sapiens
gaaccagccccagtcccacagctgtacttactgtcataggtcttattaaataggtatctatgtagtcagagcatgtttcatagaaatggagtgttcattaaactgaaacttcatacattgcctctgggcttttggggataggagtatgatacctcccaacttgaaattcccacagataggtgaggtcatagtcatcgggtgttacttaatgagcccatgtttttctttcattggatgtaaactatgctcggtgagtgcttttgagggctgcattagtggtgctttaatgtaccaagtgggatgcaatccaccattcttctttcatgttcctttttgtggaactgctgttgactctctctcactcttgagtaaggtacatacactgaggcttccattgcttggggctgccctcagcccctaggagacaggcctagtggaggagaggcagcccataagcacagagggtctgtctgctgcctgccagagcaccatcctacacacttgccttgtgaacagatggccaaggagtctggctggcctgcccccaccatggatctgagtggtcctcaccactcaggcaagcataggcagttgtctgtcctcaagagaaggaccctaggggacagaacactccacagtatgtccccagggctggtgcgtagagaacatttagagttttcctaaagctctgactttctgccactgcccttcctgaacctcagagtgggctcttaagcgttagctttcaagtgctttggggtgtttttctttgcttgggatgaataaattgtctcatggtttttaatgcttgctggttgaaacttgtaatggtccacaaagtctttacaggtttccattgcaaaaatccatctagaacgatgggatttatatttctaaaagtcaagtcaatttacctaataaaggaaaaacgggaattatctgagcccatctgaagctctcaagctctgggtcagtgacatctaagaaagcaggacacctgttatcaagaacagatatgacttagaatgaagaatgaaaccattgctttgcttctgttatttcctttgcacttgatgcaaatgttaattgtgatcagctctgaacttaaatgtgtccttgtcctgtcacttggacagttgaggaaaggcagagagagacaggctgggctgcgagggcccaagggagagggctggcatggaggcccatacgtgcacctttggcagagccccatggcagcttgggcaggaagggcatctctaacagtctccttcccccttagatagtgacgagaggctgcgagtttgtggaaatgaccctgaggaggaacgggctgggccagcttggcttccatgtgaattttgaaggaattgtcgcagatgtggaaccttttggctttgcctggaaggctggccttcgccaagggagccgcctcgtggagatctgcaaagtagccgtggccactctgacccacgagcagatgatcgacctgctccgtacttctgtgactgtgaaggtggtcatcatccagccccatgatgacggctcgccccgaaggtaaggcgtgggaggcccaagtaatgctcactcctcctttgcctctgtagcaggtggctgtcctcattgctcctgcaaggtcctcagaaaatgcagtcaagtgtgtctttgtacagtgttctgggatgtcactcatttgtacaatgttgttgggatgtcactcattcgaggaattgaaaaggagctttaaaatatgtaatagatgataaaaaataatttgctaagcattttaatggaacattgactacattaaagctgagctattctgaactaaggggaagagcacctgcctggttcccctggacctcttatatctaagaggaaataattctgtatcacagctcagccttgagcacattaaatacttaactattcagttagaatttcttcccataacatgaagccattgattatttaaaaaatatttaacagaccaatagttgtaggtatgaaagaatgttggaacagcacaggtactctctgtggtaaatactccattctcaattgaagcttgagagatgttgaactggttcagggcgttatcataaactgtcagg

SEQ ID NO: 590 - DNA, 1379 bp, Homo sapiens
tttgagtatatcctgtcacatgttgccaaatattttgatcaagaaatgctgaatgtccataatttgaattactccagctcaaggaccttacttttccagagattttccgtcatctttatggatgtactctttgtgtatgctgtccgtgagtgctgtaaatgcattgatggaaaaaaagtgggtaaagaacttacagaaaagccaaaatttattctgtcggtattacttctgtggaacttcgggttattaattgtggaccatattcattttcagtacaatggctttttatttggattaatgctactctccattgcacgattatttcagaaaaggcatatggaaggagcatttctctttgctgttctcctacatttcaagcatatctacctctatgtagcaccagcttatggtgtatatctgctgcgatcctactgtttcactgcaaataaaccagatgggtctattcgatggaagagtttcagctttgttcgtgttatttccctgggactggttgttttcttagtttctgctctttcattgggtcctttcctggccttgaatcagctgcctcaagtcttttcccgactctttcctttcaagaggggcctctgtcatgcatattgggctccaaacttctgggctttgtacaatgctttggacaaagtgctgtctgtcatcggtttgaaattgaaatttcttgatcccaacaatattcccaaggcctcaatgacaagtggtttggttcagcagttccaacacacagtccttccctcagtgactcccttggcaaccctcatctgcacactgattgccatattgccctctattttctgtctttggtttaaaccccaagggcccagaggctttctccgatgtctaactctttgtgccttgagctcctttatgtttgggtggcatgttcatgaaaaagccatacttctagcaattctcccaatgagccttttgtctgtgggaaaagcaggagacgcttcgatttttctgattctgaccacaacaggacattattccctctttcctctgctcttcactgcaccagaacttcccattaaaatcttactcatgttactattcaccatatatagtatttcgtcactgaagactttattcagaaaagaaaaacctctttttaattggatggaaactttctacctgcttggcctggggcctctggaagtctgctgtgaatttgtattccctttcacctcctggaaggtgaagtaccccttcatccctttgttactaacctcagtgtattgtgcagtaggcatcacatatgcttggttcaaactgtatgtttcagtattgattgactctgctattggcaagacaaagaaacaatgaataaaggaactgcttag

SEQ ID NO: 591 - DNA, 1016 bp, Homo sapiens
ttttttagaatttatttttattctttcagacctctcagggatgaacggacataggcttctaacacttaggtgtgggcaacattcttcgaagcacctccctcaaagtggaaaaggcctgggggctcagacgagagaagagagaaggcagggagaaggtggaggtgaggaagggaggagggggcccagggctcagtggggtgttggggagggtgggattccaccggggtttgcccatccacagctcagtggggggatctatggagtgtgtctagcaagagaggacccatggcaggcttggtaactaacatcatgcagtagcttcttctattctctcttatttttttggaaacggagtctcgctcttgttgcccaggctggagtacagtggcacaatctcagctcactgcaacctctgcctcccaggttcaagtaattctcctgcctcagcctcctgagtagctgggatcacaggtgggcaccacactgtgcccgcctgatttttgtatttttcatagagatggggtttcaccacgttgggcaggctggtctcaaactcctgtcctcaggtgttctgctcaccttgacctcccaaaagtgctgggattaggggcatgagccacagtgcctggcctattattctctttttatttttattttttcatatttttcccttatattttgttttctttgctttttaaaaatcttttttactcctcactgacttgaagctcaaaactttcctatttagcttctaatcacacactctctcttttttttttttttttttgagaaggggtctcactgtgttgccctggctcctcggtctcaaacctctggcctcaagccatcctcccatctcatccttcccaatagctgggattacaagtatgggccatcatgcctgagtaaattcttaataaatgctttctgaatggatggacggaagtatgaatgaatggcgaagtgaatgaaggaatcaacttctttctccttagtgggtgtgtgtgggttggcgg

SEQ ID NO: 592 - DNA, 1409 bp, Homo sapiens
tcgtgcctcctgggttgtgaggagtcgccgctgccgccactgcctgtgcttcatgaggaagatgctcgccgccgtctcccgcgtgctgtctggcgcttctcagaagccggcaagcagagtgctggtagcatcccgtaattttgcaaatgatgctacatttgaaattaagaaatgtgaccttcaccggctggaagaaggccctcctgtcacaacagtgctcaccagggaggatgggctcaaatactacaggatgatgcagactgtacgccgaatggagttgaaagcagatcagctgtataaacagaaaattattcgtggtttctgtcacttgtgtgatggtcaggaagcttgctgtgtgggcctggaggccggcatcaaccccacagaccatctcatcacagcctaccgggctcacggctttactttcacccggggcctttccgtccgagaaattctcgcagagcttacaggacgaaaaggaggttgtgctaaagggaaaggaggatcgatgcacatgtatgccaagaacttctacgggggcaatggcatcgtgggagcgcaggtgcccctgggcgctgggattgctctagcctgtaagtataatggaaaagatgaggtctgcctgactttatatggcgatggtgctgctaaccagggccagatattcgaagcttacaacatggcagctttgtggaaattaccttgtattttcatctgtgagaataatcgctatggaatgggaacgtctgttgagagagcggcagccagcactgattactacaagagaggcgatttcattcctgggctgagagtggatggaatggatatcctgtgcgtccgagaggcaacaaggtttgctgctgcctattgtagatctgggaaggggcccatcctgatggagctgcagacttaccgttaccacggacacagtatgagtgaccctggagtcagttaccgtacacgagaagaaattcaggaagtaagaagtaagagtgaccctattatgcttctcaaggacaggatggtgaacagcaatcttgccagtgtggaagaactaaaggaaattgatgtggaagtgaggaaggagattgaggatgctgcccagtttgccacggccgatcctgagccacctttggaagagctgggctaccacatctactccagcgacccaccttttgaagttcgtggtgccaatcagtggatcaagtttaagtcagtcagttaaggaggagaaggagaggttataccttcagggggctaccagacagtgttctcaacttggttaaggaggaagaaaacccagtcaatgaaattcaatgaaattcttggaaacttccattaagtgtgtagattgagcaggtagtaattgcatgcagtttgtacattagtgcattaaaagatgaattatt

SEQ ID NO: 593 - DNA, 1158 bp, Homo sapiens
gtgagtaattggtatgacttgcaggatgatgtacatgttagtttgtagctcaggatgattgttaagcaatagatttgctctattgaaaatgtttcatttttttcactgtacaagcaacttagatttttatttgtacaaattacttctttgtttttcttaatgatggcaatttttaaactttaattttattgtgatctcttaaagcagaggttagactttacctttctgactctgtcgtccaggctggagtgcagtggcgcaatctcactgcaagctccacttcctgggttcatgccattttcctgcctcagcctcccgagtagctgggactacaggtgcccgccaccacgcccagctaattttttgtatttttagtagagacggtttcaccgtgttagccaggatggtctcgatctcctgacgttgtgatccgcccgcctcagcctcccaaagtgctgggattacaggcatgagccaccacgcccggctagactttacctttctaaagaaattgtttactggatttataagaagttaatttttgaaaatgacatatttttgtgtgatagaaagaatggagcaagttgtgcctatttcctccaagtcagataagttttctaaaataaataaatttctagcatataaagggtagagataaactctgcaaatcttatgtctggaattatattaatgtttattgtccttgccaaaattcctagaaattaatttccttcaatagcatcctaaaactctatttttatttggggcagagtaatttcatttatagtgccagtaggtgtaccttgtgttcactcgaactaagaacaatggttaaggcagaataatgactaaaatatgttcatatattatgatgtggaaataattgataacttttaagccatactatgtttttaaagataatttgcacaaacacgtttgtgtctgttctgtccaatatagatttggcaattatttaaagagggataatcttgaaaaaaattaaccaaggtgatttcttatatgtagatgctcgattttggaatttgaaatagtagatgcacctctttaccttttttacttggataaaaacctatgatgattttgtcctgtgtgtaaatgttatttatttagcatagacattaaaaataactctctggg

SEQ ID NO: 594 - DNA, 1252 bp, Homo sapiens
atgaatcggctacagtctcaaagggcaatgcttctgcagggcactgaaagcctgaaccgggccacccaaagtattgaacgttctcatcggattgccacagagactgaccagattggctcagaaatcatagaagagctgggggaacaacgagaccagttagaacgtaccaagagtagactggtaaacacaagtgaaaacttgagcaaaagtcggaagattctccgttcaatgtccagaaaagtgacaaccaacaagctgctgctttccattatcatcttactggagctcgccatcctgggaggcctagtttactacaaattctttcgcagccattgaacttctatagggaagggtttgtggaccagaactttgaccttgtgaatgcatgatgttagggatgtggatagaataagcatattgctgctgtgggctgacagttcaaggatgcactgtatagccaggctgtgggaggagggaggaaagatgaaaaaccacttaaatgtgaaggaacaacagcaacaagaccagtatgatataccaaggtaataaatgctgtttatgacttctttaaatttacatagtactgtagcatattaataccctgtgaactgcaaaaaaccaaatacatttacagtagtattggtcaccaaaatagaggggaaactttacaattgtgagaatgtgtaaatgttctcattaaggcagtattgacccagacaaccatttagtattcatctatcccctcaatgcctcataattctggaatgcctgttgtgaaacatgtcagtgcacagtgtctcctaaattctcacacgtgcttgattttctgattcatctggtgaactgggagtaggaagttggtcatagacaatatgccctccttctcttgtctgaccaaagcttgaagcaatcacatctactgccaggttagctgtagtcttcgcctcttcctctgaggtggccaactgaggattgacttcaacaagatccagtgctgatagcaaccctggaagaacgaagtgtgacaaaacctcaggttcccttgctgctactctcagtgagggtcatcccactgggacagggagaacaagccaaagtaaaaacaagagtccattttatagtagaaaatacctatttttaggaagccccttgcacctcatcttggccatgaatttaagttaaaacactgttgtgctatagtagattaaaagaaaccttttaagataatgaaataaaccatccctgttcaact

SEQ ID NO: 595 - DNA, 2170 bp, Homo sapiens
ttcgctaattagtggtgttggtattttcatgatgggtgcaggactatcttggtaccatggagtcatgggattgcttcatcctcaaccaatagaatcccttctatgggcatattgtattttagcaggatcattagtatctgaaggagcaacacttcttgttgctgtaaatgaacttcgtaggaatgctcgggctaaaggaatgtcattttacaagtatgtaatggaaagtcgtgatcctagtacaaatgtgatattattggaggatactgctgcagtcttgggagttataatagcagccacttgcatgggccttacttctataacaggcaatccactgtatgacagcctaggttctttgggtgtgggcaccttattaggcatggtctcagcattcctcatctacactaacacagaagcactcttagggcggtccatccagccagaacaagtacaacggctcactgaactcctggagaatgacccatcagtaagggcaattcatgatgttaaagccacagatctgggattaggtaaagtaagatttaaggcagaagtagattttgatgggcgagttgttacaagatcatatttggaaaaacaagattttgaccaaatgttacaagaaattcaagaagtgaaaactcctgaagaactagagacctttatgcttaaacatggagaaaatattattgatactttaggagctgaagtagatagacttgagaaggaactgaaaaaacgaaatcctgaagttcgacatgtagatttggagatactgtgagtttgatggaatgaatcacctgggtggggaccttggaaacaagtttgtccgtccactctacaaagtttcctcctctcctacactgaaagactcagtgccatgcagaagccttttttttaagatgaaggaaatattttatgtaaagagcaactcagcaggacacagaactaaaactactacttacatctaacagacacactacaagttgaatcaatttgaaaatcatgtttttatgcttccatagggaacattttggttatttaaattgttcataatgtcccatatttcacctgttcagtgtatactgtactttgcaatcatctttccttttttcacattggtaaaaataagtggcatccataggatcatgatttttaatttgttgcctctgaagatttcactccatcaagatctgccaatcttcaatattctggctaaatcttggtatgtggtttttaaacagtcactccgtttcaaagtctgtctttccttatagaatgtggaaattatttctccataccttgtgattttgacctgagtgctaagagaatcactctccttacctagttattacaaatgttcattccagaaatgtttagttactgaattgaatgaagacatctcagtacactcttttaggtcatagtagttgccattttgtaaaatttcttttttcttctttgcttttttccccttatttggtttaatttttctaatgttaggagatatagtcctagatatttccatgggccagtgtgatgacttttttttaaatgaggttcagtaccataatgtttatttactggaagataatgcatttataagcattttaaaattctgtaaagtgggttagaaatatttataattttacaggcaggacagcatttgacttttatttaaaaggcggcactacttatgtaaatctgagctgtgggatatttcttgctttaagagagagacagaatctctcactgaaactcatggtcatgattttgtataatatagttcatactgtgtctgtgagtttcttcagttacaaatgggcatttagtatagttatattgactataacatgtaagtaaatagctttctactgaccctaagttatcaaggtggaaaaaaaacatgcaattcagtaattgaaaatgtggtgaaaagctgcagctgtcatcatcaaaacaactcataacatactttaaaatgttcaggtagcagtgagcattgttcatatgagaatggcggctgggtgatctctttgctgaattaatgagttcttaacatgtggacccaactgcctgtgtgagatctgtgtcttaaaacttactggaatggaaatctatgaattattgcaaattgtaatgctggaaacaaaaaataaatccttggttt

SEQ ID NO: 596 - DNA, 3615 bp, Homo sapiens
aagatccggaacgcgttcctgcagaacgcctcagccgtggtcatcttcaacgtgggctccaacaccaacgagaccatcaccatgccccacgcgggtgtagaagacatcgtggccataatgattcctgagccaaaagggaaggagatagtaagcctgctggaaagaaacatcaccgtgacaatgtacatcaccatcggaacccggaacttgcagaaatatgtgagccgcacttcggttgtgtttgtctccatctccttcattgtcctgatgatcatttccctcgcatggctcgtcttttattacatccagaggtttcgatatgcaaatgccagggataggaaccagcgccgactgggggatgcagcaaagaaagccatcagcaaactccagatcaggaccatcaagaagggtgacaaggaaacagagtctgattttgacaactgtgcagtttgtattgaagggtacaagcccaatgacgttgtccggatcctgccctgccggcatcttttccacaagtcctgtgttgacccctggcttctagaccatcgtacctgtcccatgtgcaagatgaacattcttaaagccctagggatcccgcccaatgccgactgcatggacgacttgcccactgacttcgagggctctctgggaggtccacccaccaaccagatcacaggtgccagcgacacaacagtgaatgaaagttcagtcactttggaccctgctgtccggactgtgggagccttgcaggtggtccaggatacagaccccatcccccaggagggagacgtcatctttactactaacagtgagcaggagccagctgtaagcagtgattctgacatttccttgatcatggcaatggaggttggactgtctgatgtagaactttccactgaccaggactgtgaagaagtgaaatcttgaaacgacaaatccagaagcaaagagatagtaggacccaagggaaaggaagggaagagtgctccaagacttggaccaggcacacacacacctccagatcaccttggcaactccagggcgctccgttcaagaatgctgacgaaaagcaatatccaaagtcttgtcaatcaggatgcagtttctccatcggtatggcagtctgtggccttggcagctgggaagttgaaagctgatttccactcctatgtccatgtagacatacacttcagaagctcctaaaacagagactgaaaggccacctttaggatttcttagtttcatttcaattctttccatgtctcatcattcttgtttttggcatgttgtttgatttctttggcaatttttttaaagattatttgtagtttactttccatctattcctttgtttttcctttgatgcactccagcttttgtataggtttctgtttagaagcaccagttcctgctatgatcagtttgtattccatctctgagatatgtggtcttgacctcccagcatgaagtgtgcatggctttgagaagtgcctcagcaccctgaaatggactaaggccagctttcattaagaatctaagttcttctaagtgggcctttaaaaaccccagctgccagagaccccaacactaagccctaaatctgctgaggccactgctggttattttaagccacatcacacttgcttccacttgccgggcttgattaagggcccacgtgacatgagaagggagctctagggaagccgttcattcttctgggtcttacagtctttggctgaaattctgaactcagaagtccctccaaggcatccagtctttggtggtgtagggctggttttaaacccagataccacattttcttcctattgaaaacaaaatgccagttgcattggtttccccctgggctagaacagtttttttcttacctctgtaagtgggttctgtaaaaaatggaggctttagagaaaagccaatcatttttaagtccaatggcaaacatagtgggggctgcagtagcacctagcttttaccttaatttcgacacacttctgttgaatctcaccagaccatgtgggaggatttaggtgaatccctagcagattgcttcccagggctccctgagtgtgtccagataccaagtgaggaatgaggtgtgatttgctgtatcatttgaaccaaaaagtatgcagcatgagaatttgctagatcgtttatcctgactgaaatagacaaagtaagagggaaaggaaaagaggtatcaagtaaatactgaaacccaatggtgtttttaaactgtttctgtttttattcatcttttgtaactatgacagaaatgtgctattttttcagtgggcaattttgtaatatattcagactatccagatacagagatgactaaggtcattgataacgtctctgaacaatcagacggatcaccttatctctacacagctggcaaacaccaggctgcggcttggattaaccaggaaagaaagcttttctcactgagttgtttttatgtattgatggggacttttccacctcattagactaatactcattcaaaaagagtttggttctgctgtaaatccttgccgcctgctgaaacatggtgtgcaggtcaacggagaatactagctgctcctttttcaccacctttaccaatttcctatttgatggtttgtaagtagacagtaaggcaaggcagatgattattaccctcagaaaggttgcatctccctaggagtccaatgcttcctgtaatgaaatccactctctatgtgtgggaaaagaggcagggaggaatgaagagagctctgaatcgagaatcctagatgaaccacacgctttactaagcctcggcttcttcatctataatgtgaagggtttaataacatgagtccccaagctcctctggctgtgggaccacagatgagtctttcagaggcaggatccatttttgcagatagctatgacttgtggcaatcaggcttcgtagcttggggaggtagagttacttgacatgtatcatgtaataacagcctttgagacttggcacaactatggtgctgagaatgaaaatctaaatgattgaagttttaagtccaagtaggagttggtttgttttgccttgtttaaaaattgctgttagtcacagagtttgcaatctctggataccttcaaatcctagctctcactgtgggattcttgatctcagaggtgtttatttttcacagtcagcataggcttgcgccactgactcctccttcagtcggctttgcccaaaacaaattttagtattactggtattaagtttagtccagtggaattagaaggataattcaatagcaacagaaatataaattatattccattcccagagagagaatgcgctttggattgtttagtcctctgattaacgagtattttctcttcctgccaagaactaggtgaatcaggaattgattgcatatgcaagccctggccacagctgcacttacaggatgcctcatagacgatgaggggtctgaaaggccaacccgaggctggcagatctgaccccaaggaggtcctgctgcaaaccccctgagcctttgccattcactacttaccaaagtttgtttctggaggattttcctgtagctttgatagttt

SEQ ID NO: 597 - DNA, 1843 bp, Homo sapiens
cctccgcggtcttccgagcggtcgcgtgaactgcttcctgcaggctggccatggcgcttcacgttcccaaggctccgggctttgcccagatgctcaaggagggagcgaaacacttttcaggattagaagaggctgtgtatagaaacatacaagcttgcaaggagcttgcccaaaccactcgtacagcatatggaccaaatggaatgaacaaaatggttatcaaccacttggagaagttgtttgtgacaaacgatgcagcaactattttaagagaactagaagtacagcatcctgctgcaaaaatgattgtaatggcttctcatatgcaagagcaagaagttggagatggcacaaactttgttctggtatttgctggagctctcctggaattagctgaagaacttctgaggattggcctgtcagtttcagaggtcatagaaggttatgaaatagcctgcagaaaagctcatgagattcttcctaatttggtatgttgttctgcaaaaaaccttcgagatattgatgaagtctcatctctacttcgtacctccataatgagtaaacaatatggtaatgaagtatttctggccaagcttattgctcaggcatgcgtatctatttttcctgattccggccatttcaatgttgataacatcagagtttgtaaaattctgggctctggtatcagttcctcttcagtattgcatggcatggtttttaagaaggaaaccgaaggtgatgtaacatctgtcaaagatgcaaaaatagcagtgtactcttgtccttttgatggcatgataacagaaactaagggaacagtgttgataaagactgctgaagaattgatgaattttagtaagggagaagaaaacctcatggatgcacaagtcaaagctattgctgatactggtgcaaatgtcgtagtaacaggtggcaaagtggcagacatggctcttcattatgcaaataaatataatatcatgttagtgaggctaaactcaaaatgggatctccgaagactttgtaaaactgttggtgctacagctcttcctagattgacacctcctgtccttgaagaaatgggacactgtgacagtgtttacctctcagaagttggagatactcaggtggtggtttttaagcatgaaaaggaagatggcgccatttctaccatagtacttcgaggctctacagacaatctgatggatgacatagaaagggcagtagacgatggtgttaatactttcaaagttcttacaagggataaacgtcttgtacccggaggtggagcaacagaaattgaattagccaaacagatcacatcatatggagagacatgtcctggacttgaacagtatgctattaagaagtttgctgaggcatttgaagctattccccgcgcactggcagaaaactctggagttaaggccaatgaagtaatctctaaactttatgcagtacatcaagaaggaaataaaaacgttggattagatattgaggctgaagtccctgctgtaaaggacatgctggaagctggtattctagatacttacctgggaaaatattgggctatcaaactcgctactaatgctgcagtcactgtacttagagtggatcagatcatcatggcaaaaccagctggtgggcccaagcctccaagtgggaagaaagactgggatgatgaccaaaatgattgaaattggcttaatttttactgtaggtgaaggctgtatttgtagtagtactcaagaatcacctgatgttttcttattctccttaaattaagagttattttgtgtttgtattcttggctggatgttataataaacatattgttactgtc

SEQ ID NO: 598 - DNA, 1384 bp, Homo sapiens
ggaagcagttgctgtggtacctgctgctgcccgagcggacgtagagcatcggacgcgggcgccgtggcgttgggcaggagggcgaagccatgacgtcagtcagagaaaatattctctttggaatgggaaatcctctgcttgacatctctgctgtagtggacaaagatttccttgataagtattctctgaaaccaaatgaccaaatcttggctgaagacaaacacaaggaactgtttgatgaacttgtgaaaaaattcaaagtcgaatatcatgctggtggctctacccagaattcaattaaagtggctcagtggatgattcaacagccacacaaagcagcaacattttttggatgcattgggatagataaatttggggagatcctgaagagaaaagctgctgaagcccatgtggatgctcattactacgagcagaatgagcagccaacaggaacttgtgctgcatgcatcactggtgacaacaggtccctcatagctaatcttgctgctgccaattgttataaaaaggaaaaacatcttgatctggagaaaaactggatgttggtagaaaaagcaagagtttgttatatagcaggcttttttcttacagtttccccagagtcagtattaaaggtggctcaccatgcttctgaaaacaacaggattttcactttgaatctatctgcaccgtttattagccagttctacaaggaatcattgatgaaagttatgccttatgttgatatactttttggaaatgagacagaagctgccacttttgctagagagcaaggctttgagactaaagacattaaagagatagccaaaaagacacaagccctgccaaagatgaactcaaagaggcagcgaatcgtgatcttcacccaagggagagatgacactataatggctacagaaagtgaagtcactgcttttgctgtcttggatcaagaccagaaagaaattattgataccaatggagctggagatgcatttgttggaggttttctgtctcaactggtctctgacaagcctctgactgaatgtatccgtgctggccactatgcagcaagcatcataattagacggactggctgcacctttcctgagaagccagacttccactgatggaagagctgaaaacacaagcccaggagtgcagacactgccctaattgcttcctgagaattcccatattaataaagaagaaaattatctgccattttttcctactataataatgctgaatcttaatttagagggtacaagggtatggtaatgcttgtagaatctttattatctcaacaatctaaaaaatgatgtttatttccatagtttgatagtgccacttaaatgccaattaaacaagaatataacatttcaat

SEQ ID NO: 599 - DNA, 1439 bp, Homo sapiens
ggcgagcgagcaccttcgacgcggtccggggaccccctcgtcgctgtcctcccgacgcggacccgcgtgccccaggcctcgcgctgcccggccggctcctcgtgtcccactcccggcgcacgccctcccgcgagtcccgggcccctcccgcgcccctcttctcggcgcgcgcgcagcatggcgcccccgcaggtcctcgcgttcgggcttctgcttgccgcggcgacggcgacttttgccgcagctcaggaagaatgtgtctgtgaaaactacaagctggccgtaaactgctttgtgaataataatcgtcaatgccagtgtacttcagttggtgcacaaaatactgtcatttgctcaaagctggctgccaaatgtttggtgatgaaggcagaaatgaatggctcaaaacttgggagaagagcaaaacctgaaggggccctccagaacaatgatgggctttatgatcctgactgcgatgagagcgggctctttaaggccaagcagtgcaacggcacctccatgtgctggtgtgtgaacactgctggggtcagaagaacagacaaggacactgaaataacctgctctgagcgagtgagaacctactggatcatcattgaactaaaacacaaagcaagagaaaaaccttatgatagtaaaagtttgcggactgcacttcagaaggagatcacaacgcgttatcaactggatccaaaatttatcacgagtattttgtatgagaataatgttatcactattgatctggttcaaaattcttctcaaaaaactcagaatgatgtggacatagctgatgtggcttattattttgaaaaagatgttaaaggtgaatccttgtttcattctaagaaaatggacctgacagtaaatggggaacaactggatctggatcctggtcaaactttaatttattatgttgatgaaaaagcacctgaattctcaatgcagggtctaaaagctggtgttattgctgttattgtggttgtggtgatagcagttgttgctggaattgttgtgctggttatttccagaaagaagagaatggcaaagtatgagaaggctgagataaaggagatgggtgagatgcatagggaactcaatgcataactatataatttgaagattatagaagaagggaaatagcaaatggacacaaattacaaatgtgtgtgcgtgggacgaagacatctttgaaggtcatgagtttgttagtttaacatcatatatttgtaatagtgaaacctgtactcaaaatataagcagcttgaaactggctttaccaatcttgaaatttgaccacaagtgtcttatatatgcagatctaatgtaaaatccagaacttggactccatcgttaaaattatttatgtgtaacattcaaatgtgtgcattaaatatgcttccacagtaaaatctgaaaaactg

SEQ ID NO: 600 - DNA, 1258 bp, Homo sapiens
gcgaagctcccgaggcctcctcctcttcactgcccgtctgaggcccggcagcccctccctggcgctcttcctgagcaatggccacttcgttgcacagatggaaggcctcgggactcggctccgcgcccagagccgccagcgctcccggcctggccgctggcacaaggtctccgtgcgctgggagaagaaccggatcctgctggtgacggacggggcccgggcctggagccaggaggggccgcaccggcagcaccagggggcagagcacccccagccccacaccctctttgtgggcggcctcccggccagcagccacagctccaaacttccggtgaccgtcgggttcagcggctgtgtgaagagactgaggctgcacgggaggcccctgggggcccccacacggatggcaggggtcacaccctgcatcttgggccccctggaggcgggcctgttcttcccaggcagcgggggagttatcactttaggtctgtgggtgctggcatcccaggccccagcagggcagggcagggggctccaggaggttctggggaggggccccccctttcttctccatcacaacccctccccgcagacctcccaggagctacactgcctgatgtgggcctggaactggaggtgcggcccctggcagtcaccggactgatcttccacttgggccaggcccggacgccccccttacttgcagttgcaggtgaccgagaagcaagtcctgctgcgggcggatgacggagcaggggagttctccacgtcagtgacccgcccctcagtgctgtgtgatggccagtggcaccggctagcggtgatgaaaagcgggaatgtgctccggctggaggtggacgcgcagagcaaccacaccgtgggccccttgctggcggctgcagctggtgccccagcccctctgtacctcgggggcctgcctgagcccatggccgtgcagccctggccccccgcctactgcggctgcatgaggaggctggcggtgaaccggtcccccgtcgccatgactcgctctgtggaggtccacggggcagtgggggccagtggctgcccagccgcctaggacacagccaaccccggcccctggtcaggcccctgcagctgcctcacaccgctccttgtgctcgcctcataggtgtctatttggactctaagctctacgggtgacagatcttgtttctgaagatggtttaagttatagcttcttaaacgaaagaataaaatactgcaaaatgttttt

SEQ ID NO: 601 - DNA, 2342 bp, Homo sapiens
acaaagcgccagctgaggggccgctgcgggtggagtgcggcggagtcggcctcgcgaccccagcttgatccgccgcctgctgcaccgcgcctccgccgcgttcctgcgcgtcccgagccccgacggccgcgtgagtcccgtccgtgcggggaaggcagggccgggtcggcgccgcctgtggagaggacccggcggccgggcctgcttggagccgggcgcggtggcagcggcggcagcggcggcgacttccgaggcccgggctagacagcgcagggccatggctgaggcggccccggccccgacatctgaatgggactccgagtgccttacatccctgcagccccttcctcttcctacacccccagcagcaaatgaggcacacctgcagacagcagctatctctctgtggacagtggtggccgccgtgcaggctatagagaggaaggtggagatccacagccggcgactcctacacctagaggtcggacagggacagcagagaagaaactagccagctgtgaaaagacagttaccgagcttgggaaccagctggagggcaagtgggccgtgctgggaaccctgctgcaggagtacgggctgctgcagaggcggctggagaacttggagaacctgctgcgcaacaggaacttctggatcctgcggctccctccaggtattaagggagatatcccaaaggtgcctgtggcatttgatgatgtctccatctacttttccactccagagtgggaaaaattagaagaatggcaaaaggaactttacaagaatatcatgaagggcaactacgagtctctcatctccatggattatgctataaatcaacctgatgtcttatctcagattcaaccagaaggggaacataatacagaggaccaggcagggccagaggaaagtgagattcccacagaccccagtgaagagcctggtatttcaacatcagatattctgtcttggattaaacaagaagaagagcctcaggttggggccccaccggagtccaaggagagtgacgtgtacaaaagcacttatgctgatgaagagcttgtcatcaaagctgaaggccttgctagatcctcgttgtgccctgaggttccagtccctttctcttctccaccagcagcagcaaaggatgctttttcagatgtggctttcaaaagccagcagtctacatccatgacaccttttggacgtccagccactgacctgcctgaagcctctgagggacaagtgacttttactcagttgggtagctatcccctcccacctccagttggcgagcaggtgttctcatgccaccactgtggcaagaatctcagccaagacatgttgctgacccaccaatgtagccatgctactgagcaccccttaccctgtgcccagtgccctaagcactttactccacaggcggacctcagcagcacctcccaggaccatgccagcgagacaccccccacctgcccacactgtgccaggacttttactcacccatcaagacttacctaccatcttcgggtccataacagcactgagcgtcctttcccctgtcctgattgccccaagcgctttgctgaccaggctcgactcaccagccaccggagagctcatgcaagcgaaaggcccttccgctgtgcccagtgcggcaggagcttcagcttgaaaatcagcctcctgctccaccagcggggtcatgcacaagagcgccctttctcctgccctcagtgtggcattgacttcaacggccactcggccctgatccgccaccagatgatccacacaggcgagcgtccttacccctgcactgactgcagtaagagcttcatgcgcaaggagcacctgctgaaccaccggcggctgcacacaggcgagcggcccttcagttgtcctcactgtggcaagagcttcatccgcaagcaccacctaatgaaacaccagcgcatccacaccggggagcggccctacccctgctcctactgtggcaggagcttccgctacaaacagacactcaaggaccacctccgttcaggccacaatggaggctgtgggggtgatagtgacccatcaggtcagccacccaacccaccaggtcccctcataactgggcttgaaacttctggcctgggtgtcaacactgaaggtctagagaccaaccagtggtatggggaagggagtggagggggagttttgtaaatccaaatctctgtggcttcatgcttgtatatgctcacagcagggcacaaaatccaagagaaggtctgtgagccccatccaacacccacagtaattattatctggcacatcaatgaatttggggtcctatacacttg

SEQ ID NO: 602 - DNA, 579 bp, Homo sapiens
gagcactgcttgggcctgtggcctggtatgtgtgtgcatgactaacacagaacttgcctgaagactggacggaaacttagaagccagccctgggtcctagagcgaggctaggactgggcacgtagagggaaacagcacatcccttcctgaagcccctttctaagtatccaggtcgtcatccagtgtcagcaacacctggggtgtggacgccagatcagccacagggaaggaggcagctgctaccttcacgtacccacccggctcggccgggaggcccgcttaccaggaaggacccgaacatggcgatggaggagaggaagtgccagatgtcgtggtcgtcaaagaagtcgaggaggatgcagtcccggttgtgctccctcgactctgcaggggttttcttggggagcaacaagaaaaactgccgaatgaccctgctctggcagggcaagggccagacccatctgccatcttgctcctgggcacccctctctccagccccaggcaggacagcagcaattctgacctgtcccttgtccttgtccctaccccttcccgatctaacaaatggcctttggttac

SEQ ID NO: 603 - DNA, 1358 bp, Homo sapiens
tgacgtcacttccgcccgcgacccccttccagacccgctcccgaaaccttgtcgaaggaccaaaggcgaccggtgcaggtgcacgacgccagctcccttctggggggccggggcctgggggttgccatggcccccagccacctgtcagtgcgggagatgagggaagatgagaagcccctggtgctggagatgctgaaggccggcgtgaaggacacggaaaaccgcgtggccctccatgccttgacacggccgccggccctgctcctcctggcggcggccaacagcggcctgcgctttgtcctggcttccttcgccctggccctccttctgccggtgttcctggctgtggccgccgtgaagctgggcctgcgggcccgatggggctcgctgcctccgccgggtggcctggggggcccctgggtggccgtgcggggctccggtgacgtgtgtggggtcctggctctggcccctggcacaaatgcaggggacggggcccgggtcacccgcctgtctgtctctcgctggcaccgccgccggggcgtgggcaggaggctgctggccttcgcggaggcccgggctcgggcctgggctgggggcatgggggagccccgggcccggctcgtggtccccgtggctgtggccgcctggggggtgggagggatgctggagggctgtggctaccacgccgaggggggctggggctgcctgggctacacgctggtgagggaattcagcaaagacctgtgaagctacagactgacagccagggcagggaggaaggaggggcgccagcacatgatgatcgcctactgtctgcgggttcttttacctgctctccctcagtgagtcctcaaccaccctgggcccagaaacagaggcctgccgaggggaggagcctggcctctgtccacccgtcagcagtgtgaagtctgtagtgtttgagcttctcagagtggaatgactccttttccttcctggccctcgggggcctctcgaggtcagcctctccaacccctacctcagctcctgtctgcactgagaaacctccccgggtgatgtctgcaaagtctgtgctgtccgtgccccaggctgggagagctatctggggagggggagaggaggccgagcagaatacaccccagagttagggtttgcgactccgcctccctgggacctggattgggtcagatgcctgtccttggaggggacaaggttgactgcttaggaggcgcgacgcacagggctgccaggcctggcccctctctgggaaggttgagagctgagacgggcagccctgtcccttcctccagatccgtctggttttttacaccgtttgttaataaagcctgaaaccgctg

SEQ ID NO: 604 - DNA, 481 bp, Homo sapiens
gccggatttggttagctgagcccaccgagaggcgcctgcaggatgaaagctctctgtctcctcctcctccctgtcctggggctgttggtgtctagcaagaccctgtgctccatggaagaagccatcaatgagaggatccaggaggtcgccggctccctaatatttagggcaataagcagcattggcctggagtgccagagcgtcacctccaggggggacctggctacttgcccccgaggcttcgccgtcaccggctgcacttgtggctccgcctgtggctcgtgggatgtgcgcgccgagaccacatgtcactgccagtgcgcgggcatggactggaccggagcgcgctgctgtcgtgtgcagccctgaggtcgcgcgcagcgcgtgcacagcgcgggcggaggcggctccaggtccggaggggttgcgggggagctggaaataaacctggagatgatgatgatgatgatgatggagcggg

SEQ ID NO: 605 - DNA, 886 bp, Homo sapiens
ccttcgtgggcaccacagagcccgcctccccacccctgagcagcacctcacccaccactgctgcggccactatgcctgtggtgccctctgtggccagcctggcccctccgggggaggcctcgctctgcctggaagaggtggccccccctgccagtgggacccgcaaagctcgggtgctctatgactacgaggcagccgacagcagtgagctggccctgctggctgatgagctcatcactgtctacagcctgcctggcatggaccctgactggctcattggcgagagaggcaacaagaagggcaaggtccctgtcacctacttggaactgctcagctaggcaggtgcccccatcccccccgcattctggcctaggcaggagaggatgggcgcagccctgccacttaacttgtttgttggtgacacagttgttcagagtggggagaattcaccccattctgtccctgcccctagtcacctagctgtgagggtgcctgaggctgaatggctccacccctcccccagccctgcttctgacctgtggctctggagcccctgcccctgcctgcatccccgagcaccccaccctccaggctccactaaggagggaggggctgtctgcagcagctgcactcagcacctaggccagggtggggccgccgcagatgggctcaggaagccccaggtgcactcagcgagagccctgcctttcagttgccaaaagctgcatcaggggaatgcggcaaggcacacagggctctggcagcccctggggactgggcgctgcccctgggaggggagagcctggccagggctggtgttgggcccggagcagcatcttccggtgctatcctcccctcccacccctcacagctcaagccaagtcca

SEQ ID NO: 606 - DNA, 361 bp, Homo sapiens
gtttctgtaattttggtagagttggggtttcacatgttggccaggctgttctcaaactcctgacctcaggtcatccgcccgcctcggcctcccagagtgctgggattagaggtgtgagccaccgcgcccggccagtctctgtattttaattggtgtatttagactaattcatgtacattgaatgtgatgactgggttcgtgggattatcatctaccatatttgtaactgttttctatttgttgcccttggtcttagtttctatttgcctttcttttctgctttctctggtttcagttaagcattttatatgattccatagtcttgtcttttgtagcgtatcaattatacttccatatatag

SEQ ID NO: 607 - DNA, 455 bp, Homo sapiens
cccgccccgccccgcccggctgctccatggcgctgtgcgaggccgcgggctgcgggagtgccctgctctggcctcgcttgttgctcttcggggactccatcacccaggtacggccgccccgacgctcggcctcccgccccggcctccctgcggggtcgctgccgagcaggccgaggctcctcgccgtcctcttcggcgcccgagacggctgggccggagcctggccacgcccgtggagacaccggagagtggcgggtcccccagtggctgcgccttccgggcccgcggcgtcccggaggtcacgacggcgtccgcgagagcccgggctccaggcacagacgcgaggggacccggccgcgctgcccgccccgcgccgcctcccaccgcgggtcgagatgcgcggtcttcccctcggcgccctcctgggcagcggcctttcctccgggtccgggtta

SEQ ID NO: 608 - DNA, 760 bp, Homo sapiens
  misc_feature 483: n = a,c,g, or t
gttttgtttcttaagttgggaaacagaatgggccagggaggttgagtgactgaagaccaagggttggtgcagcctcctcgccgcgctgcgggggctgggccgcacaggcttctgcccttctcggtgtccaggctccttgggtgatgctggagttgtcatggctgcagttcagtgtgagattttttaccaggtattgcgcttaagggacatgattttccattttcttcgcccggacaacttgaatgaaatgggcactgttgattccacttctgtcgaggagcttcggggctcagaagaggtgatgacgtgcccaaggtgacgcaactcgtgaacagccgtgcctgccttgggcgcagcctcccggcgccagagctgggctcttcaacacggcatttagcgcagaaagtcgtggttcaggcagtatgggccgctgtgacaaaacacctaagactgggtagtttataaagaacagacattcaggcnaggcacggtgactcacgcctgtaatcccagcactttgggaggccgaggcgcgtggatcatttgaggtcaggagtttgaaaccagcctggccaacatggtgaaaccccatctctactaaaaaaacaaaactagctgggggtggtggtgcatgcctgtggtcccagctacttgggaggctaaggtagaagaattgcttgaacctgggaggcagagattgcagtgagccgagatcacgccattgcactccagcctgggtgacacagtgagactccatctc

SEQ ID NO: 609 - DNA, 476 bp, Homo sapiens
ttttttttttttttttttttttttttttaattgttgtgtagtctcatttattatgaaaagattcttccagtatgtacatacgaaccaaaagtatcagtttatcagtcccactcacatcccacctggtccatctccatgatcacttacctaaactagtgtggttgcctcctgtgggtttcccagcttccaccctcaccccctacgacttcttgtccagacagcagccagaatggtcctgtaaaacataagtcatgtcgcatttgtctctgctctgacccctccccgggctctgacctcgctggaaagaaaaatcagtgtcggccgggtgtggtggctctcgcctgtaatcctaacactccgggaggccgaggtgggcatgagccaccacgcccagccatatattttcaaaattagccaggcgtggtggcgggcgcctgcagtcccagccactcggaaggctgaggcaggcttagaaa

SEQ ID NO: 610 - DNA, 406 bp, Homo sapiens
caccttctgggctcctggccagcaccccacccccaggagccagggacaggtggcatgtgttggggtcgggggatggcccccatctcgaagtgttctggaatttgggggcaacccttgcccagcccagacatcaagaacttctgatctcctgcccaccaggaggggacttagccatggacttggccagtaggcctggggagggagggctttggcagccaaagtccactggccctgccgtgcccctgagtaggaaactgtcccctaggggctgggtggccccactgatatatgcaaacccgccggtccgagccctgttcctgcctgtgctcctctgtgcccaggctggctctcccccaaccctagcatgtatactctgccacggacgtcccgtgggccatgattgtgg

SEQ ID NO: 611 - DNA, 433 bp, Homo sapiens
  misc_feature 421: n = a,c,g, or t
gtttcagcagagattaaacattttatataaatgactcttaaagctttacaccttgggaccagtgtaccttctcgtgcagaatacatttagatataaaaagacgttattaatacattgcacagttttcaaaatttaaaaacaaaaccgaacgctgctctgcggcagccgccgccgggttgctgctacatgaacggtcccagccgaggcccagcgcccttccaacgtccgctgccccggcaggttccctcggggctctttgggctctaaattggctcaccgcagcctcttgcgcggggtctgctccaccgagcccacgccagggcggcgcttggagaggacacggcgcggggacatcgcccgacgacttctcaggcgctgatctcttgcgcttggcgaagaaatcggagatcagaggcccggnacagcttcttga

SEQ ID NO: 612 - DNA, 714 bp, Homo sapiens
gttttttgtgtttttggaagagatggtgtttcactgtgttggccaggatggtctcgatctcctgacctcgtgatccacccgcctcggcctcccagggtgctgggattacgggcatgagccaccgcgcccggccggaactctgtttcaaaaagaaaaaaaacaaaggaaaaagagggtgtccatgggcaatgaaggttgggctcagtgcataccgtaggtgcccagtgagtgctgccagtggccatggttggcttcctgttgctgctcacagtctgggagggagaagcaggcactcccatcctctctgtctggtggttctgggagcaccatagggacgcccaaggagggaaggagccccactgcacccgcccccaaccccggccttccagactcagcaacagactcactccccctcccggccctcatccacagagcgtgccaggaagatgtcgagcccgggcatcgacggcgaccccaagcctccatgcttgcctcgaaacggtctggtgaagctgccgggccagcccaacggcctgggtgcggccagcatcaccaagggcacgccagccacctaagaaccgcccctgccagccaccacccccacccaccctcccaccacccagcctggctgctccactgtcccgggctgccctggctgggggcccgtgcaccccggcaggtggaccagcctcagccttggcacctgggcaccca

SEQ ID NO: 613 - DNA, 531 bp, Homo sapiens
  misc_feature 318: n = a,c,g, or t
ccaggatcgaagccatgactgggtgcaggcgggcgccaggcccgctgtgggtgggcaccagttctcagcaccgctcactgctgccgggcacactgggaccagcaggctcctcagccaaccctgtccctcggcccggccctgccagagagggaccccagcacatcgtgggcacgggcagggctcagccgctcccacctccccacagaagcccaggagtgtgtggacgtctgagcccagctttctgcgtgccctcctggcccctcactcccggcagcgggccggcctcgcccccactccccctcctaccccggcaggggnttccggggccttttcacctggagaaacattcccactcccctttggcctccctgtactctgagctgtgaatatttttaaccctgtaaatacggccagctcttgtgacacagagactattttatcaattgtcagtcccgttcctttaccataggattctccacagtggcttccgactcaggctccaatggaccaaataaaagcgttttgttttgc

SEQ ID NO: 614 - DNA, 907 bp, Homo sapiens
ctttgttagtccctggtctgccctctcgggtggtgggcatgtatgcgagttctctttctgattgccagaaatttcttttccactgtgtgagcaagagacagatttttttaaattgtctctcttctcttttatttattttgttctccatttgtggccctcacctccgcctgccttccttccccattctttctgtggattcctccttcttcccccttcaatttcaccatttctcctcccccgtcttcgccctcccatccccacccctttccccttttaaaataattcagtgatgtctcgggaatactagcacaccctcttcattcagctgagcgcgggactctgcattaattcaagagcaatgttctgtgatggtgcccgagatgcgtggactgagcccagaccgcaggctgcccgagcccgccccctgcccggctgcggggagccctgagcccaggtccgcgggccgccgccaacgccacgtcctggccctgccggaagaagaggcatggcggccccagcagtgcgctctgctcgaggccgacgcctcggacgaggtgggcatgctgccggcttccccgcgcgccgcctctggcttcgacaacttcttccaggtgcaggagggcgagggccagggctgggagggcgccatggcactggaggcgggctccagccctttcctgccggtgagccccgaggtcatgaagcggcggcgcgggggcctcatcgagcagcgcgacatcatcaaggcccacgaggcgcacaagatgcagagcaccccgcaggcccggcgcaaggaatgggagatggctcgcttcggggaggcggtggtcgccaggccagggtccggcgatggagactcggaccagagcaggaaccggcaaggaacccccgtgccggcctcggggca

SEQ ID NO: 615 - DNA, 543 bp, Homo sapiens
gtgttcctgggcccctggcagctgggatcattgaggcctccccactgggggtgctggggccagtcctagccagggcagagagtgggtcagccgtctcagctccttgagtggttggtgctggtactggtctcatggttttagacctggcacccagtgggtatggggagccctgggcacctgtgggcctacttatggaagtcatcctcttcccttatcaggtaccgccaaccctgtggtgcagctgctgccccagtttccccttgtgctccaggtccccactgtggcagttgctcttctctgagatccagccagtgtagctgagtccctggtgtcttgctaacttcctgccagcccctgaacccagaactctctctttcccttggccactggctaggagcctctaccactaaaaaaactcagtttcctagccaggtgcagtggctcacgcctgtaacctcggcactttgggaggctgaggcaggaggatcgcttgagaacaggagtttgagaccagcctgggcaacatagtgagactccacctct

SEQ ID NO: 616 - DNA, 445 bp, Homo sapiens
cttgccccctgtccatttatttaagcccccataggtgcccttcacccccaaaaccagctgtacagaatctttgatacagacctatttgctaggggtgctgccggggatttggggtcagcatctggccccctatctcctgaccagctgagtcatgaggccggtttctctctctctcccacttttgtcccccagccaagctctaaagcacatgtagccgctgagacctgctgtttctgctgggggcaggctcctcttcccccagccccgggagcctcccccagcttcctgcagccccgacctctcaggttagaccctgggccctggagcttaggggattctccccaccccagccccacacctgctccttccctaatgctttgaggttttcttggttggaagctgcagctggcccaagaaagaaaataaaaaacaacacttttgcatg

SEQ ID NO: 617 - DNA, 394 bp, Homo sapiens
  misc_feature 322,378: n = a,c,g, or t
gctgctgctgcggctgcccagaccgccccggccgcagaggtcggcgccgcggctgcgcccccagtcccaggtgccgctggggctaccaggcgctgtccgtggtgctgctgctggcgcagggcggcctgctggacctgtacctcatcgccgtcaccgacctgtactggtgctcctggatcgccactgacctggtggtggtggtgggctgggccatcttcttcgccaagaacagccggggccgtcggggcggcgcagccagcggcgcgcacaaccaccacctgcaccaccaccacgccgcgccgcccctgcatctgcccgcccnctcggccgctaccgctggggccaaggcacgcggagcccgcggggcgccggcggcgnggggggcggcctgggg

SEQ ID NO: 618 - DNA, 710 bp, Homo sapiens
ctttgctcactcgctctgccatggtgccatgactgtactgtgcccatgcgtgacctggactgtggaccctctgctgctccgcctctcccctccccactggctctgtctgctctcctgccaccctgctggccgggagcccctccccggggagttcttggtgaagtccttcccgggcctccttgtgtttttgcctcattcctactgtcacacaggtcacgagggtggactccctacaatcaacaaagcaaacagagagcctgtgggaggggctgacagcagcagccggctgtttgggggatgatggaggtgacatcaggcagaggagagtgcagcctcacagtgactttctcagaggtgacagagatgatggatgagcagctggattttcgtgatgaaggacggaagcagcagcgggccggcaaggccatacctcggtgagggacaggtggacaacggtcacctatctgtagccaggggcagttgtgtggccagctgtctctctgggatgagtcaggaggcctggaggcttggggagaggtgtggagaaggagagaacatggcccaggccctttccttccccctgtgctgacagcattgctgtgggggtggcccactgccctcccctggccctcatgtccccccggggctggggtccgcctgcctgtgctgtgcttgcgacgtgcatcaataaaccaccatggcctgagggc

SEQ ID NO: 619 - DNA, 557 bp, Homo sapiens
  misc_feature 428: n = a,c,g, or t
agcagctcagaggcagccgtggcttggtcaacatgggcccgggagggcatgggcagttctcacgtccttgtccttggatattggccgttgcttgtgcaagtgtgtctgtaaccctctcgttatgtgccctgcagtcatacaggagtggcagaagagaggcggacagccctggcagctcatcgagcccgtggatggattccaccccaacgaggtaagcacagtcacatggtggctgcagaaggctatttgatggtttgttggtttttaattatggttacacattcatgtgtttatttttatcctgttttgttccagaaaggatttgaggtagtgtacatacatgtataggatagaagatttaataaaaacaaagtgaaatttgggacaatagggaaataaagtagaaattatacctggattcctgattnaatttctataattcataaaatatgtgcagggcattcctgagaaactgccagaagggcagctctgtgcgatgctaaaaggggcagtaagccatggcttccataatacaagaaaaataaatcaagcactcc

SEQ ID NO: 620 - DNA, 728 bp, Homo sapiens
gtgaccctctggattctaagcgtggagaggccccgttcgctcagcgtatcgacccgactcgggagaagctgacacccgagcaactgcattccatgcggcaggcggagcttgcccagtggcagaaggtcctaccacggcggcgaacccggaacatcgtgaccggcctaggcatcggggccctggtgttggctatttatggttacaccttctactcgatttcccaggagcgtttcctagatgagctagaagacgaggccaaagctgcccgagcccgagctctggcaagggcgtcagggtcctaatctggatgggtattgatcatgtccaacctgctggagccccttcacatggtggatgatgccccatgaccctgtagaaattgaatcctgctcacaacattgttggccttcttactaaccttggaccgtgattgagcccaagaaaccagggacttacgcatttggccaatgtcaaaagaacagaactttgcccactgcacacttgctgtgtacaatgactgagccctttcttgtagtttgtttccttgtttgagaggtgtgcatgcgaccgtggcttttcccaaagtttctgactttgtggtttacccccttcaccttccagggacgcagttgttttgaggttagacgtggcagctctgtgcagtgtttgagcctacagtgggatacatagggtcaaattgagaataataaactgagtcattctcctag

SEQ ID NO: 621 - DNA, 753 bp, Homo sapiens
ccaccacccaccccttcccttccaggtgcggcaaagaggaaacagacacaaggtggtctagaggtccatttcatttcaatgagtgtgacagccgctcttcttggggcctatgggggaaaggcattggtccgtggtgggagtgaagctgctcccacaagatgcattcccaactggatcaggaagaccttcagatttaggggaggtctttgtggaagtctttagtggagtcttcccctgcccgctagatgtccggtcggttttagcccgcgttggctactggatggtccgctgtgcgggcttcttgggctcctgcttctcttccctgggcttggagcttcgcctcttgtccttccctgacctcggcgtggtgtcttccttcacggcctgtcctcgcccctcgtctgccgctgtcgctcccgcttcctccttggctctggcacacggcggctccttggctctcggccttgccctcctggtcctcctcgccctggcattggccttggctttcgccctcgcgttccgtctccacacttctctggccttcctggccgccttgcgaaggggctggcggcgcctccgggagctccggggcgcggctggggtcctccagggagcgcgcgtgccctcctcttgcctcgcgcgtcccggctttctcctgggcttgggaaccttccagaccctgaagtagccggcggcgtcgctgccgctgacccggaggagcgtggccttggcctgccccctgggcgcttcgtg

SEQ ID NO: 622 - DNA, 685 bp, Homo sapiens
ggaaaaaccccaaaacaggactgtggtgacaactctggtcaggtgtgatttgacatgagggccggaggcggttgctgacggcaggactggagaggctgcgtgcccggcactggcagcgaggctcgtgtgtcccccaggcagatctgggcactttcccaacccaggtttatgcgtctccagggaagcctcggtgccagagtggtgggcagatctgaccatccccacagaccagaaacaaggaatttctgggattacccagtcccccttcaacccagttgatgtaaccacctcattttttacaaatacagaatctattctactcaggctatgggcctcgtcctcactcagttattgcgagtgttgctgtccgcatgctccgggccccacgtggctcctgtgctctagatcatggtgactcccccgccctgtggttggaatcgatgccacggattgcaggccaaatttcagatcgtgtttccaaacacccttgctgtgccctttaatgggattgaaagcacttttaccacatggagaaatatatttttaatttgtgatgcttttctacaaggtccactatttctgagtttaatgtgtttccaacacttaaggagactctaatgaaagctgatgaattttcttttctgtccaaacaagtaaaataaaaataaaagtctatttagatgtc

SEQ ID NO: 623 - DNA, 596 bp, Homo sapiens
ctccatccctgttgtccggagccagctcactgtcttccacactggtgctaactggcccaggcactggagtggaatagaatgcagctggaggctacgcatggcctctgcagcacacgcagctggagagggcttctgtccctgtcagcggcagagggcgttggggctggccggggcaccttgtccctgctatggtccacatgctcacgctgtccacctgccaggtggagtgtatgtggctgtggccctccctcgtggaggtgccgtgctttaaagaggccttagtgcccgggatgggcacagtgttttgaagggaggtgggagctcttgctctcctggtcactgcagaatgacagagaaggtgaagctccatgcatgtgtgcgcgggtgtatgtgcgctcagggtctctgtttaagtatcagctaaagatgtgcttcctccgtgtctgtcatacactgagaccaacaggctacagtgtccctgattcttggaaaagcctggagaagctggggagatgcggttcacaatgcctcggtataggaggctgtgttgagctgacattcaaatggattctttaataataatgaaactggcgagt

SEQ ID NO: 624 - DNA, 21 bp, Artificial Sequence
  linker sequence
gaattcggccaaagaggccta

SEQ ID NO: 625 - DNA, 21 bp, Artificial Sequence
  linker sequence
gaattcggccttcatggccta

SEQ ID NO: 626 - DNA, 8 bp, Artificial Sequence
  linker sequence
  unsure (7)..(8)
gaattcnn

SEQ ID NO: 627 - DNA, 15 bp, Artificial Sequence
  linker sequence
  unsure (1)..(9)
nnnnnnnnnctcgag

SEQ ID NO: 628 - DNA, 15 bp, Artificial Sequence
  linker sequence
  unsure (1)..(9)
nnnnnnnnngtcgac

SEQ ID NO: 629 - DNA, 24 bp, Artificial Sequence
  linker sequence
acggcctctttggccctcgagaca

What is claimed is:

1. An isolated polynucleotide comprising a nucleotide sequence selected from the group consisting of:
SEQ ID NO: 1, SEQ ID NO: 2, SEQ ID NO: 3, SEQ ID NO: 4, SEQ ID NO: 5, SEQ ID NO: 6, SEQ ID NO: 7, SEQ ID NO: 8, SEQ ID NO: 9, SEQ ID NO: 10, SEQ ID NO: 11, SEQ ID NO: 12, SEQ ID NO: 13, SEQ ID NO: 14, SEQ ID NO: 15, SEQ ID NO: 16, SEQ ID NO: 17, SEQ ID NO: 18, SEQ ID NO: 19, SEQ ID NO: 20, SEQ ID NO: 21, SEQ ID NO: 22, SEQ ID NO: 23, SEQ ID NO: 24, SEQ ID NO: 25, SEQ ID NO: 26, SEQ ID NO: 27, SEQ ID NO: 28, SEQ ID NO: 29, SEQ ID NO: 30, SEQ ID NO: 31, SEQ ID NO: 32, SEQ ID NO: 33, SEQ ID NO: 34, SEQ ID NO: 35, SEQ ID NO: 36, SEQ ID NO: 37, SEQ ID NO: 38, SEQ ID NO: 39, SEQ ID NO: 40, SEQ ID NO: 41, SEQ ID NO: 42, SEQ ID NO: 43, SEQ ID NO: 44, SEQ ID NO: 45, SEQ ID NO: 46, SEQ ID NO: 47, SEQ ID NO: 48, SEQ ID NO: 49, SEQ ID NO: 50, SEQ ID NO: 51, SEQ ID NO: 52, SEQ ID NO: 53, SEQ ID NO: 54, SEQ ID NO: 55, SEQ ID NO: 56, SEQ ID NO: 57, SEQ ID NO: 58, SEQ ID NO: 59, SEQ ID NO: 60, SEQ ID NO: 61, SEQ ID NO: 62, SEQ ID NO: 63, SEQ ID NO: 64, SEQ ID NO: 65, SEQ ID NO: 66, SEQ ID NO: 67, SEQ ID NO: 68, SEQ ID NO: 69, SEQ ID NO: 70, SEQ ID NO: 71, SEQ ID NO: 72, SEQ ID NO: 73, SEQ ID NO: 74, SEQ ID NO: 75, SEQ ID NO: 76, SEQ ID NO: 77, SEQ ID NO: 78, SEQ ID NO: 79, SEQ ID NO: 80, SEQ ID NO: 81, SEQ ID NO: 82, SEQ ID NO: 83, SEQ ID NO: 84, SEQ ID NO: 85, SEQ ID NO: 86, SEQ ID NO: 87, SEQ ID NO: 88, SEQ ID NO: 89, SEQ ID NO: 90, SEQ ID NO: 91, SEQ ID NO: 92, SEQ ID NO: 93, SEQ ID NO: 94, SEQ ID NO: 95, SEQ ID NO: 96, SEQ ID NO: 97, SEQ ID NO: 98, SEQ ID NO: 99, SEQ ID NO: 100,SEQ ID NO: 101, SEQ ID NO: 102, SEQ ID NO: 103, SEQ ID NO: 104, SEQ ID NO: 105, SEQ ID NO: 106, SEQ ID NO: 107, SEQ ID NO: 108, SEQ ID NO: 109, SEQ ID NO: 110, SEQ ID NO: 111, SEQ ID NO: 112, SEQ ID NO: 113, SEQ ID NO: 114, SEQ ID NO: 115, SEQ ID NO: 116, SEQ ID NO: 117, SEQ ID NO: 118, SEQ ID NO: 119, SEQ ID NO: 120, SEQ ID NO: 121, SEQ ID NO: 122, SEQ ID NO: 123, SEQ ID NO: 124, SEQ ID NO: 125, SEQ ID NO: 126, SEQ ID NO: 127, SEQ ID NO: 128, SEQ ID NO: 129, SEQ ID NO: 130, SEQ ID NO: 131, SEQ ID NO: 132, SEQ ID NO: 133, SEQ ID NO: 134, SEQ ID NO: 135, SEQ ID NO: 136, SEQ ID NO: 137, SEQ ID NO: 138, SEQ ID NO: 139, SEQ ID NO: 140, SEQ ID NO: 141, SEQ ID NO: 142, SEQ ID NO: 143, SEQ ID NO: 144, SEQ ID NO: 145, SEQ ID NO: 146, SEQ ID NO: 147, SEQ ID NO: 148, SEQ ID NO: 149, SEQ ID NO: 150, SEQ ID NO: 151, SEQ ID NO: 152, SEQ ID NO: 153, SEQ ID NO: 154, SEQ ID NO: 155, SEQ ID NO: 156, SEQ ID NO: 157, SEQ ID NO: 158, SEQ ID NO: 159, SEQ ID NO: 160, SEQ ID NO: 161, SEQ ID NO: 162, SEQ ID NO: 163, SEQ ID NO: 164, SEQ ID NO: 165, SEQ ID NO: 166, SEQ ID NO: 167, SEQ ID NO: 168, SEQ ID NO: 169, SEQ ID NO: 170, SEQ ID NO: 171, SEQ ID NO: 172, SEQ ID NO: 173, SEQ ID NO: 174, SEQ ID NO: 175, SEQ ID NO: 176, SEQ ID NO: 177, SEQ ID NO: 178, SEQ ID NO: 179, SEQ ID NO: 180, SEQ ID NO: 181, SEQ ID NO: 182, SEQ ID NO: 183, SEQ ID NO: 184, SEQ ID NO: 185, SEQ ID NO: 186, SEQ ID NO: 187, SEQ ID NO: 188, SEQ ID NO: 189, SEQ ID NO: 190, SEQ ID NO: 191, SEQ ID NO: 192, SEQ ID NO: 193, SEQ ID NO: 194, SEQ ID NO: 195, SEQ ID NO: 196, SEQ ID NO: 197, SEQ ID NO: 198, SEQ ID NO: 199, SEQ ID NO: 200, SEQ ID NO: 201, SEQ ID NO: 202, SEQ ID NO: 203, SEQ ID NO: 204, SEQ ID NO: 205, SEQ ID NO: 206, SEQ ID NO: 207, SEQ ID NO: 208, SEQ ID NO: 209, SEQ ID NO: 210, SEQ ID NO: 211, SEQ ID NO: 212, SEQ ID NO: 213, SEQ ID NO: 214, SEQ ID NO: 215, SEQ ID NO: 216, SEQ ID NO: 217, SEQ ID NO: 218, SEQ ID NO: 219, SEQ ID NO: 220, SEQ ID NO: 221, SEQ ID NO: 222, SEQ ID NO: 223, SEQ ID NO: 224, SEQ ID NO: 225, SEQ ID NO: 226, SEQ ID NO: 227, SEQ ID NO: 228, SEQ ID NO: 229, SEQ ID NO: 230, SEQ ID NO: 231, SEQ ID NO: 232, SEQ ID NO: 233, SEQ ID NO: 234, SEQ ID NO: 235, SEQ ID NO: 236, SEQ ID NO: 237, SEQ ID NO: 238, SEQ ID NO: 239, SEQ ID NO: 240, SEQ ID NO: 241, SEQ ID NO: 242, SEQ ID NO: 243, SEQ ID NO: 244, SEQ ID NO: 245, SEQ ID NO: 246, SEQ ID NO: 247, SEQ ID NO: 248, SEQ ID NO: 249, SEQ ID NO: 250, SEQ ID NO: 251, SEQ ID NO: 252, SEQ ID NO: 253, SEQ ID NO: 254, SEQ ID NO: 255, SEQ ID NO: 256, SEQ ID NO: 257, SEQ ID NO: 258, SEQ ID NO: 259, SEQ ID NO: 260, SEQ ID NO: 261, SEQ ID NO: 262, SEQ ID NO: 263, SEQ ID NO: 264, SEQ ID NO: 265, SEQ ID NO: 266, SEQ ID NO: 267, SEQ ID NO: 268, SEQ ID NO: 269, SEQ ID NO: 270, SEQ ID NO: 271, SEQ ID NO: 272, SEQ ID NO: 273, SEQ ID NO: 274, SEQ ID NO: 275, SEQ ID NO: 276, SEQ ID NO: 277, SEQ ID NO: 278, SEQ ID NO: 279, SEQ ID NO: 280, SEQ ID NO: 281, SEQ ID NO: 282, SEQ ID NO: 283, SEQ ID NO: 284, SEQ ID NO: 285, SEQ ID NO: 286, SEQ ID NO: 287, SEQ ID NO: 288, SEQ ID NO: 289, SEQ ID NO: 290, SEQ ID NO: 291, SEQ ID NO: 292, SEQ ID NO: 293, SEQ ID NO: 294, SEQ ID NO: 295, SEQ ID NO: 296, SEQ ID NO: 297, SEQ ID NO: 298, SEQ ID NO: 299, SEQ ID NO: 300, SEQ ID NO: 301, SEQ ID NO: 302, SEQ ID NO: 303, SEQ ID NO: 304, SEQ ID NO: 305, SEQ ID NO: 306, SEQ ID NO: 307, SEQ ID NO: 308, SEQ ID NO: 309, SEQ ID NO: 310, SEQ ID NO: 311, SEQ ID NO: 312, SEQ ID NO: 313, SEQ ID NO: 314, SEQ ID NO: 315, SEQ ID NO: 316, SEQ ID NO: 317, SEQ ID NO: 318, SEQ ID NO: 319, SEQ ID NO: 320, SEQ ID NO: 321, SEQ ID NO: 322, SEQ ID NO: 323, SEQ ID NO: 324, SEQ ID NO: 325, SEQ ID NO: 326, SEQ ID NO: 327, SEQ ID NO: 328, SEQ ID NO: 329, SEQ ID NO: 330, SEQ ID NO: 331, SEQ ID NO: 332, SEQ ID NO: 333, SEQ ID NO: 334, SEQ ID NO: 335, SEQ ID NO: 336, SEQ ID NO: 337, SEQ ID NO: 338, SEQ ID NO: 339, SEQ ID NO: 340, SEQ ID NO: 341, SEQ ID NO: 342, SEQ ID NO: 343, SEQ ID NO: 344, SEQ ID NO: 345, SEQ ID NO: 346, SEQ ID NO: 347, SEQ ID NO: 348, SEQ ID NO: 349, SEQ ID NO: 350, SEQ ID NO: 351, SEQ ID NO: 352, SEQ ID NO: 353, SEQ ID NO: 354, SEQ ID NO: 355, SEQ ID NO: 356, SEQ ID NO: 357, SEQ ID NO: 358, SEQ ID NO: 359, SEQ ID NO: 360, SEQ ID NO: 361, SEQ ID NO: 362, SEQ ID NO: 363, SEQ ID NO: 364, SEQ ID NO: 365, SEQ ID NO: 366, SEQ ID NO: 367, SEQ ID NO: 368, SEQ ID NO: 369, SEQ ID NO: 370, SEQ ID NO: 371, SEQ ID NO: 372, SEQ ID NO: 373, SEQ ID NO: 374, SEQ ID NO: 375, SEQ ID NO: 376, SEQ ID NO: 377, SEQ ID NO: 378, SEQ ID NO: 379, SEQ ID NO: 380, SEQ ID NO: 381, SEQ ID NO: 382, SEQ ID NO: 383, SEQ ID NO: 384, SEQ ID NO: 385, SEQ ID NO: 386, SEQ ID NO: 387, SEQ ID NO: 388, SEQ ID NO: 389, SEQ ID NO: 390, SEQ ID NO: 391, SEQ ID NO: 392, SEQ ID NO: 393, SEQ ID NO: 394, SEQ ID NO: 395, SEQ ID NO: 396, SEQ ID NO: 397, SEQ ID NO: 398, SEQ ID NO: 399, SEQ ID NO: 400, SEQ ID NO: 401, SEQ ID NO: 402, SEQ ID NO: 403, SEQ ID NO: 404, SEQ ID NO: 405, SEQ ID NO: 406, SEQ ID NO: 407, SEQ ID NO: 408, SEQ ID NO: 409, SEQ ID NO: 410, SEQ ID NO: 411, SEQ ID NO: 412, SEQ ID NO: 413, SEQ ID NO: 414, SEQ ID NO: 415, SEQ ID NO: 416, SEQ ID NO: 417, SEQ ID NO: 418, SEQ ID NO: 419, SEQ ID NO: 420, SEQ ID NO: 421, SEQ ID NO: 422, SEQ ID NO: 423, SEQ ID NO: 424, SEQ ID NO: 425, SEQ ID NO: 426, SEQ ID NO: 427, SEQ ID NO: 428, SEQ ID NO: 429, SEQ ID NO: 430, SEQ ID NO: 431, SEQ ID NO: 432, SEQ ID NO: 433, SEQ ID NO: 434, SEQ ID NO: 435, SEQ ID NO: 436, SEQ ID NO: 437, SEQ ID NO: 438, SEQ ID NO: 439, SEQ ID NO: 440, SEQ ID NO: 441, SEQ ID NO: 442, SEQ ID NO: 443, SEQ ID NO: 444, SEQ ID NO: 445, SEQ ID NO: 446, SEQ ID NO: 447, SEQ ID NO: 448, SEQ ID NO: 449, SEQ ID NO: 450, SEQ ID NO: 451, SEQ ID NO: 452, SEQ ID NO: 453, SEQ ID NO: 454, SEQ ID NO: 455, SEQ ID NO: 456, SEQ ID NO: 457, SEQ ID NO: 458, SEQ ID NO: 459, SEQ ID NO: 460, SEQ ID NO: 461, SEQ ID NO: 462, SEQ ID NO: 463, SEQ ID NO: 464, SEQ ID NO: 465, SEQ ID NO: 466, SEQ ID NO: 467, SEQ ID NO: 468, SEQ ID NO: 469, SEQ ID NO: 470, SEQ ID NO: 471, SEQ ID NO: 472, SEQ ID NO: 473, SEQ ID NO: 474, SEQ ID NO: 475, SEQ ID NO: 476, SEQ ID NO: 477, SEQ ID NO: 478, SEQ ID NO: 479, SEQ ID NO: 480, SEQ ID NO: 481, SEQ ID NO: 482, SEQ ID NO: 483, SEQ ID NO: 484, SEQ ID NO: 485, SEQ ID NO: 486, SEQ ID NO: 487, SEQ ID NO: 488, SEQ ID NO: 489, SEQ ID NO: 490, SEQ ID NO: 491, SEQ ID NO: 492, SEQ ID NO: 493, SEQ ID NO: 494, SEQ ID NO: 495, SEQ ID NO: 496, SEQ ID NO: 497, SEQ ID NO: 498, SEQ ID NO: 499, SEQ ID NO: 500, SEQ ID NO: 501, SEQ ID NO: 502, SEQ ID NO: 503, SEQ ID NO: 504, SEQ ID NO: 505, SEQ ID NO: 506, SEQ ID NO: 507, SEQ ID NO: 508, SEQ ID NO: 509, SEQ ID NO: 510, SEQ ID NO: 511, SEQ ID NO: 512, SEQ ID NO: 513, SEQ ID NO: 514, SEQ ID NO: 515, SEQ ID NO: 516, SEQ ID NO: 517, SEQ ID NO: 518, SEQ ID NO: 519, SEQ ID NO: 520, SEQ ID NO: 521, SEQ ID NO: 522, SEQ ID NO: 523, SEQ ID NO: 524, SEQ ID NO: 525, SEQ ID NO: 526, SEQ ID NO: 527, SEQ ID NO: 528, SEQ ID NO: 529, SEQ ID NO: 530, SEQ ID NO: 531, SEQ ID NO: 532, SEQ ID NO: 533, SEQ ID NO: 534, SEQ ID NO: 535, SEQ ID NO: 536, SEQ ID NO: 537, SEQ ID NO: 538, SEQ ID NO: 539, SEQ ID NO: 540, SEQ ID NO: 541, SEQ ID NO: 542, SEQ ID NO: 543, SEQ ID NO: 544, SEQ ID NO: 545, SEQ ID NO: 546, SEQ ID NO: 547, SEQ ID NO: 548, SEQ ID NO: 549, SEQ ID NO: 550, SEQ ID NO: 551, SEQ ID NO: 552, SEQ ID NO: 553, SEQ ID NO: 554, SEQ ID NO: 555, SEQ ID NO: 556, SEQ ID NO: 557, SEQ ID NO: 558, SEQ ID NO: 559, SEQ ID NO: 560, SEQ ID NO: 561, SEQ ID NO: 562, SEQ ID NO: 563, SEQ ID NO: 564, SEQ ID NO: 565, SEQ ID NO: 566, SEQ ID NO: 567, SEQ ID NO: 568, SEQ ID NO: 569, SEQ ID NO: 570, SEQ ID NO: 571, SEQ ID NO: 572, SEQ ID NO: 573, SEQ ID NO: 574, SEQ ID NO: 575, SEQ ID NO: 576, SEQ ID NO: 577, SEQ ID NO: 578, SEQ ID NO: 579, SEQ ID NO: 580, SEQ ID NO: 581, SEQ ID NO: 582, SEQ ID NO: 583, SEQ ID NO: 584, SEQ ID NO: 585, SEQ ID NO: 586, SEQ ID NO: 587, SEQ ID NO: 588, SEQ ID NO: 589, SEQ ID NO: 590, SEQ ID NO: 591, SEQ ID NO: 592, SEQ ID NO: 593, SEQ ID NO: 594, SEQ ID NO: 595, SEQ ID NO: 596, SEQ ID NO: 597, SEQ ID NO: 598, SEQ ID NO: 599, SEQ ID NO: 600, SEQ ID NO: 601, SEQ ID NO: 602, SEQ ID NO: 603, SEQ ID NO: 604, SEQ ID NO: 605, SEQ ID NO: 606, SEQ ID NO: 607, SEQ ID NO: 608, SEQ ID NO: 609, SEQ ID NO: 610, SEQ ID NO: 611, SEQ ID NO: 612, SEQ ID NO: 613, SEQ ID NO: 614, SEQ ID NO: 615, SEQ ID NO: 616, SEQ ID NO: 617, SEQ ID NO: 618, SEQ ID NO: 619, SEQ ID NO: 620, SEQ ID NO: 621, SEQ ID NO: 622, and SEQ ID NO: 623;
or a complement of said sequence.

2. An isolated polynucleotide consisting of a nucleotide sequence selected from the group consisting of:
SEQ ID NO: 1, SEQ ID NO: 2, SEQ ID NO: 3, SEQ ID NO: 4, SEQ ID NO: 5, SEQ ID NO: 6, SEQ ID NO: 7, SEQ ID NO: 8, SEQ ID NO: 9, SEQ ID NO: 10, SEQ ID NO: 11, SEQ ID NO: 12, SEQ ID NO: 13, SEQ ID NO: 14, SEQ ID NO: 15, SEQ ID NO: 16, SEQ ID NO: 17, SEQ ID NO: 18, SEQ ID NO: 19, SEQ ID NO: 20, SEQ ID NO: 21, SEQ ID NO: 22, SEQ ID NO: 23, SEQ ID NO: 24, SEQ ID NO: 25, SEQ ID NO: 26, SEQ ID NO: 27, SEQ ID NO: 28, SEQ ID NO: 29, SEQ ID NO: 30, SEQ ID NO: 31, SEQ ID NO: 32, SEQ ID NO: 33, SEQ ID NO: 34, SEQ ID NO: 35, SEQ ID NO: 36, SEQ ID NO: 37, SEQ ID NO: 38, SEQ ID NO: 39, SEQ ID NO: 40, SEQ ID NO: 41, SEQ ID NO: 42, SEQ ID NO: 43, SEQ ID NO: 44, SEQ ID NO: 45, SEQ ID NO: 46, SEQ ID NO: 47, SEQ ID NO: 48, SEQ ID NO: 49, SEQ ID NO: 50, SEQ ID NO: 51, SEQ ID NO: 52, SEQ ID NO: 53, SEQ ID NO: 54, SEQ ID NO: 55, SEQ ID NO: 56, SEQ ID NO: 57, SEQ ID NO: 58, SEQ ID NO: 59, SEQ ID NO: 60, SEQ ID NO: 61, SEQ ID NO: 62, SEQ ID NO: 63, SEQ ID NO: 64, SEQ ID NO: 65, SEQ ID NO: 66, SEQ ID NO: 67, SEQ ID NO: 68, SEQ ID NO: 69, SEQ ID NO: 70, SEQ ID NO: 71, SEQ ID NO: 72, SEQ ID NO: 73, SEQ ID NO: 74, SEQ ID NO: 75, SEQ ID NO: 76, SEQ ID NO: 77, SEQ ID NO: 78, SEQ ID NO: 79, SEQ ID NO: 80, SEQ ID NO: 81, SEQ ID NO: 82, SEQ ID NO: 83, SEQ ID NO: 84, SEQ ID NO: 85, SEQ ID NO: 86, SEQ ID NO: 87, SEQ ID NO: 88, SEQ ID NO: 89, SEQ ID NO: 90, SEQ ID NO: 91, SEQ ID NO: 92, SEQ ID NO: 93, SEQ ID NO: 94, SEQ ID NO: 95, SEQ ID NO: 96, SEQ ID NO: 97, SEQ ID NO: 98, SEQ ID NO: 99, SEQ ID NO: 100, SEQ ID NO: 101, SEQ ID NO: 102, SEQ ID NO: 103, SEQ ID NO: 104, SEQ ID NO: 105, SEQ ID NO: 106, SEQ ID NO: 107, SEQ ID NO: 108, SEQ ID NO: 109, SEQ ID NO: 110, SEQ ID NO: 111, SEQ ID NO: 112, SEQ ID NO: 113, SEQ ID NO: 114, SEQ ID NO: 115, SEQ ID NO: 116, SEQ ID NO: 117, SEQ ID NO: 118, SEQ ID NO: 119, SEQ ID NO: 120, SEQ ID NO: 121, SEQ ID NO: 122, SEQ ID NO: 123, SEQ ID NO: 124, SEQ ID NO: 125, SEQ ID NO: 126, SEQ ID NO: 127, SEQ ID NO: 128, SEQ ID NO: 129, SEQ ID NO: 130, SEQ ID NO: 131, SEQ ID NO: 132, SEQ ID NO: 133, SEQ ID NO: 134, SEQ ID NO: 135, SEQ ID NO: 136, SEQ ID NO: 137, SEQ ID NO: 138, SEQ ID NO: 139, SEQ ID NO: 140, SEQ ID NO: 141, SEQ ID NO: 142, SEQ ID NO: 143, SEQ ID NO: 144, SEQ ID NO: 145, SEQ ID NO: 146, SEQ ID NO: 147, SEQ ID NO: 148, SEQ ID NO: 149, SEQ ID NO: 150, SEQ ID NO: 151, SEQ ID NO: 152, SEQ ID NO: 153, SEQ ID NO: 154, SEQ ID NO: 155, SEQ ID NO: 156, SEQ ID NO: 157, SEQ ID NO: 158, SEQ ID NO: 159, SEQ ID NO: 160, SEQ ID NO: 161, SEQ ID NO: 162, SEQ ID NO: 163, SEQ ID NO: 164, SEQ ID NO: 165, SEQ ID NO: 166, SEQ ID NO: 167, SEQ ID NO: 168, SEQ ID NO: 169, SEQ ID NO: 170, SEQ ID NO: 171, SEQ ID NO: 172, SEQ ID NO: 173, SEQ ID NO: 174, SEQ ID NO: 175, SEQ ID NO: 176, SEQ ID NO: 177, SEQ ID NO: 178, SEQ ID NO: 179, SEQ ID NO: 180, SEQ ID NO: 181, SEQ ID NO: 182, SEQ ID NO: 183, SEQ ID NO: 184, SEQ ID NO: 185, SEQ ID NO: 186, SEQ ID NO: 187, SEQ ID NO: 188, SEQ ID NO: 189, SEQ ID NO: 190, SEQ ID NO: 191, SEQ ID NO: 192, SEQ ID NO: 193, SEQ ID NO: 194, SEQ ID NO: 195, SEQ ID NO: 196, SEQ ID NO: 197, SEQ ID NO: 198, SEQ ID NO: 199, SEQ ID NO: 200, SEQ ID NO: 201, SEQ ID NO: 202, SEQ ID NO: 203, SEQ ID NO: 204, SEQ ID NO: 205, SEQ ID NO: 206, SEQ ID NO: 207, SEQ ID NO: 208, SEQ ID NO: 209, SEQ ID NO: 210, SEQ ID NO: 211, SEQ ID NO: 212, SEQ ID NO: 213, SEQ ID NO: 214, SEQ ID NO: 215, SEQ ID NO: 216, SEQ ID NO: 217, SEQ ID NO: 218, SEQ ID NO: 219, SEQ ID NO: 220, SEQ ID NO: 221, SEQ ID NO: 222, SEQ ID NO: 223, SEQ ID NO: 224, SEQ ID NO: 225, SEQ ID NO: 226, SEQ ID NO: 227, SEQ ID NO: 228, SEQ ID NO: 229, SEQ ID NO: 230, SEQ ID NO: 231, SEQ ID NO: 232, SEQ ID NO: 233, SEQ ID NO: 234, SEQ ID NO: 235, SEQ ID NO: 236, SEQ ID NO: 237, SEQ ID NO: 238, SEQ ID NO: 239, SEQ ID NO: 240, SEQ ID NO: 241, SEQ ID NO: 242, SEQ ID NO: 243, SEQ ID NO: 244, SEQ ID NO: 245, SEQ ID NO: 246, SEQ ID NO: 247, SEQ ID NO: 248, SEQ ID NO: 249, SEQ ID NO: 250, SEQ ID NO: 251, SEQ ID NO: 252, SEQ ID NO: 253, SEQ ID NO: 254, SEQ ID NO: 255, SEQ ID NO: 256, SEQ ID NO: 257, SEQ ID NO: 258, SEQ ID NO: 259, SEQ ID NO: 260, SEQ ID NO: 261, SEQ ID NO: 262, SEQ ID NO: 263, SEQ ID NO: 264, SEQ ID NO: 265, SEQ ID NO: 266, SEQ ID NO: 267, SEQ ID NO: 268, SEQ ID NO: 269, SEQ ID NO: 270, SEQ ID NO: 271, SEQ ID NO: 272, SEQ ID NO: 273, SEQ ID NO: 274, SEQ ID NO: 275, SEQ ID NO: 276, SEQ ID NO: 277, SEQ ID NO: 278, SEQ ID NO: 279, SEQ ID NO: 280, SEQ ID NO: 281, SEQ ID NO: 282, SEQ ID NO: 283, SEQ ID NO: 284, SEQ ID NO: 285, SEQ ID NO: 286, SEQ ID NO: 287, SEQ ID NO: 288, SEQ ID NO: 289, SEQ ID NO: 290, SEQ ID NO: 291, SEQ ID NO: 292, SEQ ID NO: 293, SEQ ID NO: 294, SEQ ID NO: 295, SEQ ID NO: 296, SEQ ID NO: 297, SEQ ID NO: 298, SEQ ID NO: 299, SEQ ID NO: 300, SEQ ID NO: 301, SEQ ID NO: 302, SEQ ID NO: 303, SEQ ID NO: 304, SEQ ID NO: 305, SEQ ID NO: 306, SEQ ID NO: 307, SEQ ID NO: 308, SEQ ID NO: 309, SEQ ID NO: 310, SEQ ID NO: 311, SEQ ID NO: 312, SEQ ID NO: 313, SEQ ID NO: 314, SEQ ID NO: 315, SEQ ID NO: 316, SEQ ID NO: 317, SEQ ID NO: 318, SEQ ID NO: 319, SEQ ID NO: 320, SEQ ID NO: 321, SEQ ID NO: 322, SEQ ID NO: 323, SEQ ID NO: 324, SEQ ID NO: 325, SEQ ID NO: 326, SEQ ID NO: 327, SEQ ID NO: 328, SEQ ID NO: 329, SEQ ID NO.330, SEQ ID NO: 331, SEQ ID NO: 332, SEQ ID NO: 333, SEQ ID NO: 334, SEQ ID NO: 335, SEQ ID NO: 336, SEQ ID NO: 337, SEQ ID NO: 338, SEQ ID NO: 339, SEQ ID NO: 340, SEQ ID NO: 341, SEQ ID NO: 342, SEQ ID NO: 343, SEQ ID NO: 344, SEQ ID NO: 345, SEQ ID NO: 346, SEQ ID NO: 347, SEQ ID NO: 348, SEQ ID NO: 349, SEQ ID NO: 350, SEQ ID NO: 351, SEQ ID NO: 352, SEQ ID NO: 353, SEQ ID NO: 354, SEQ ID NO: 355, SEQ ID NO: 356, SEQ ID NO: 357, SEQ ID NO: 358, SEQ ID NO: 359, SEQ ID NO: 360, SEQ ID NO: 361, SEQ ID NO: 362, SEQ ID NO: 363, SEQ ID NO: 364, SEQ ID NO: 365, SEQ ID NO: 366, SEQ ID NO: 367, SEQ ID NO: 368, SEQ ID NO: 369, SEQ ID NO: 370, SEQ ID NO: 371, SEQ ID NO: 372, SEQ ID NO: 373, SEQ ID NO: 374, SEQ ID NO: 375, SEQ ID NO: 376, SEQ ID NO: 377, SEQ ID NO: 378, SEQ ID NO: 379, SEQ ID NO: 380, SEQ ID NO: 381, SEQ ID NO: 382, SEQ ID NO: 383, SEQ ID NO: 384, SEQ ID NO: 385, SEQ ID NO: 386, SEQ ID NO: 387, SEQ ID NO: 388, SEQ ID NO: 389, SEQ ID NO: 390, SEQ ID NO: 391, SEQ ID NO: 392, SEQ ID NO: 393, SEQ ID NO: 394, SEQ ID NO: 395, SEQ ID NO: 396, SEQ ID NO: 397, SEQ ID NO: 398, SEQ ID NO: 399, SEQ ID NO: 400, SEQ ID NO: 401, SEQ ID NO: 402, SEQ ID NO: 403, SEQ ID NO: 404, SEQ ID NO: 405, SEQ ID NO: 406, SEQ ID NO: 407, SEQ ID NO: 408, SEQ ID NO: 409, SEQ ID NO: 410, SEQ ID NO: 411, SEQ ID NO: 412, SEQ ID NO: 413, SEQ ID NO: 414, SEQ ID NO: 415, SEQ ID NO: 416, SEQ ID NO: 417, SEQ ID NO: 418, SEQ ID NO: 419, SEQ ID NO: 420, SEQ ID NO: 421, SEQ ID NO: 422, SEQ ID NO: 423, SEQ ID NO: 424, SEQ ID NO: 425, SEQ ID NO: 426, SEQ ID NO: 427, SEQ ID NO: 428, SEQ ID NO: 429, SEQ ID NO: 430, SEQ ID NO: 431, SEQ ID NO: 432, SEQ ID NO: 433, SEQ ID NO: 434, SEQ ID NO: 435, SEQ ID NO: 436, SEQ ID NO: 437, SEQ ID NO: 438, SEQ ID NO: 439, SEQ ID NO: 440, SEQ ID NO: 441, SEQ ID NO: 442, SEQ ID NO: 443, SEQ ID NO: 444, SEQ ID NO: 445, SEQ ID NO: 446, SEQ ID NO: 447, SEQ ID NO: 448, SEQ ID NO: 449, SEQ ID NO: 450, SEQ ID NO: 451, SEQ ID NO: 452, SEQ ID NO: 453, SEQ ID NO: 454, SEQ ID NO: 455, SEQ ID NO: 456, SEQ ID NO: 457, SEQ ID NO: 458, SEQ ID NO: 459, SEQ ID NO: 460, SEQ ID NO: 461, SEQ ID NO: 462, SEQ ID NO: 463, SEQ ID NO: 464, SEQ ID NO: 465, SEQ ID NO: 466, SEQ ID NO: 467, SEQ ID NO: 468, SEQ ID NO: 469, SEQ ID NO: 470, SEQ ID NO: 471, SEQ ID NO: 472, SEQ ID NO: 473, SEQ ID NO: 474, SEQ ID NO: 475, SEQ ID NO: 476, SEQ ID NO: 477, SEQ ID NO: 478, SEQ ID NO: 479, SEQ ID NO: 480, SEQ ID NO: 481, SEQ ID NO: 482, SEQ ID NO: 483, SEQ ID NO: 484, SEQ ID NO: 485, SEQ ID NO: 486, SEQ ID NO: 487, SEQ ID NO: 488, SEQ ID NO: 489, SEQ ID NO: 490, SEQ ID NO: 491, SEQ ID NO: 492, SEQ ID NO: 493, SEQ ID NO: 494, SEQ ID NO: 495, SEQ ID NO: 496, SEQ ID NO: 497, SEQ ID NO: 498, SEQ ID NO: 499, SEQ ID NO: 500, SEQ ID NO: 501, SEQ ID NO: 502, SEQ ID NO: 503, SEQ ID NO: 504, SEQ ID NO: 505, SEQ ID NO: 506, SEQ ID NO: 507, SEQ ID NO: 508, SEQ ID NO: 509, SEQ ID NO: 510, SEQ ID NO: 511, SEQ ID NO: 512, SEQ ID NO: 513, SEQ ID NO: 514, SEQ ID NO: 515, SEQ ID NO: 516, SEQ ID NO: 517, SEQ ID NO: 518, SEQ ID NO: 519, SEQ ID NO: 520, SEQ ID NO: 521, SEQ ID NO: 522, SEQ ID NO: 523, SEQ ID NO: 524, SEQ ID NO: 525, SEQ ID NO: 526, SEQ ID NO: 527, SEQ ID NO: 528, SEQ ID NO: 529, SEQ ID NO: 530, SEQ ID NO: 531, SEQ ID NO: 532, SEQ ID NO: 533, SEQ ID NO: 534, SEQ ID NO: 535, SEQ ID NO: 536, SEQ ID NO: 537, SEQ ID NO: 538, SEQ ID NO: 539, SEQ ID NO: 540, SEQ ID NO: 541, SEQ ID NO: 542, SEQ ID NO: 543, SEQ ID NO: 544, SEQ ID NO: 545, SEQ ID NO: 546, SEQ ID NO: 547, SEQ ID NO: 548, SEQ ID NO: 549, SEQ ID NO: 550, SEQ ID NO: 551, SEQ ID NO: 552, SEQ ID NO: 553, SEQ ID NO: 554, SEQ ID NO: 555, SEQ ID NO: 556, SEQ ID NO: 557, SEQ ID NO: 558, SEQ ID NO: 559, SEQ ID NO: 560, SEQ ID NO: 561, SEQ ID NO: 562, SEQ ID NO: 563, SEQ ID NO: 564, SEQ ID NO: 565, SEQ ID NO: 566, SEQ ID NO: 567, SEQ ID NO: 568, SEQ ID NO: 569, SEQ ID NO: 570, SEQ ID NO: 571, SEQ ID NO: 572, SEQ ID NO: 573, SEQ ID NO: 574, SEQ ID NO: 575, SEQ ID NO: 576, SEQ ID NO: 577, SEQ ID NO: 578, SEQ ID NO: 579, SEQ ID NO: 580, SEQ ID NO: 581, SEQ ID NO: 582, SEQ ID NO: 583, SEQ ID NO: 584, SEQ ID NO: 585, SEQ ID NO: 586, SEQ ID NO: 587, SEQ ID NO: 588, SEQ ID NO: 589, SEQ ID NO: 590, SEQ ID NO: 591, SEQ ID NO: 592, SEQ ID NO: 593, SEQ ID NO: 594, SEQ ID NO: 595, SEQ ID NO: 596, SEQ ID NO: 597, SEQ ID NO: 598, SEQ ID NO: 599, SEQ ID NO: 600, SEQ ID NO: 601, SEQ ID NO: 602, SEQ ID NO: 603, SEQ ID NO: 604, SEQ ID NO: 605, SEQ ID NO: 606, SEQ ID NO: 607, SEQ ID NO: 608, SEQ ID NO: 609, SEQ ID NO: 610, SEQ ID NO: 611, SEQ ID NO: 612, SEQ ID NO: 613, SEQ ID NO: 614, SEQ ID NO: 615, SEQ ID NO: 616, SEQ ID NO: 617, SEQ ID NO: 618, SEQ ID NO: 619, SEQ ID NO: 620, SEQ ID NO: 621, SEQ ID NO: 622, and SEQ ID NO: 623,
or a complement of said sequence.

3. An isolated polynucleotide comprising a nucleotide sequence which hybridizes to a sequence selected from the group consisting of:
SEQ ID NO: 1, SEQ ID NO: 2, SEQ ID NO: 3, SEQ ID NO: 4, SEQ ID NO: 5, SEQ ID NO: 6, SEQ ID NO: 7, SEQ ID NO: 8, SEQ ID NO: 9, SEQ ID NO: 10, SEQ ID NO: 11, SEQ ID NO: 12, SEQ ID NO: 13, SEQ ID NO: 14, SEQ ID NO: 15, SEQ ID NO: 16, SEQ ID NO: 17, SEQ ID NO: 18, SEQ ID NO: 19, SEQ ID NO: 20, SEQ ID NO: 21, SEQ ID NO: 22, SEQ ID NO: 23, SEQ ID NO: 24, SEQ ID NO: 25, SEQ ID NO: 26, SEQ ID NO: 27, SEQ ID NO: 28, SEQ ID NO: 29, SEQ ID NO: 30, SEQ ID NO: 31, SEQ ID NO: 32, SEQ ID NO: 33, SEQ ID NO: 34, SEQ ID NO: 35, SEQ ID NO: 36, SEQ ID NO: 37, SEQ ID NO: 38, SEQ ID NO: 39, SEQ ID NO: 40, SEQ ID NO: 41, SEQ ID NO: 42, SEQ ID NO: 43, SEQ ID NO: 44, SEQ ID NO: 45, SEQ ID NO: 46, SEQ ID NO: 47, SEQ ID NO: 48, SEQ ID NO: 49, SEQ ID NO: 50, SEQ ID NO: 51, SEQ ID NO: 52, SEQ ID NO: 53, SEQ ID NO: 54, SEQ ID NO: 55, SEQ ID NO: 56, SEQ ID NO: 57, SEQ ID NO: 58, SEQ ID NO: 59, SEQ ID NO: 60, SEQ ID NO: 61, SEQ ID NO: 62, SEQ ID NO: 63, SEQ ID NO: 64, SEQ ID NO: 65, SEQ ID NO: 66, SEQ ID NO: 67, SEQ ID NO: 68, SEQ ID NO: 69, SEQ ID NO: 70, SEQ ID NO: 71, SEQ ID NO: 72, SEQ ID NO: 73, SEQ ID NO: 74, SEQ ID NO: 75, SEQ ID NO: 76, SEQ ID NO: 77, SEQ ID NO: 78, SEQ ID NO: 79, SEQ ID NO: 80, SEQ ID NO: 81, SEQ ID NO: 82, SEQ ID NO: 83, SEQ ID NO: 84, SEQ ID NO: 85, SEQ ID NO: 86, SEQ ID NO: 87, SEQ ID NO: 88, SEQ ID NO: 89, SEQ ID NO: 90, SEQ ID NO: 91, SEQ ID NO: 92, SEQ ID NO: 93, SEQ ID NO: 94, SEQ ID NO: 95, SEQ ID NO: 96, SEQ ID NO: 97, SEQ ID NO: 98, SEQ ID NO: 99, SEQ ID NO: 100, SEQ ID NO: 101, SEQ ID NO: 102, SEQ ID NO: 103, SEQ ID NO: 104, SEQ ID NO: 105, SEQ ID NO: 106, SEQ ID NO: 107, SEQ ID NO: 108, SEQ ID NO: 109, SEQ ID NO: 110, SEQ ID NO: 111, SEQ ID NO: 112, SEQ ID NO: 113, SEQ ID NO: 114, SEQ ID NO: 115, SEQ ID NO: 116, SEQ ID NO: 117, SEQ ID NO: 118, SEQ ID NO: 119, SEQ ID NO: 120, SEQ ID NO: 121, SEQ ID NO: 122, SEQ ID NO: 123, SEQ ID NO: 124, SEQ ID NO: 125, SEQ ID NO: 126, SEQ ID NO: 127, SEQ ID NO: 128, SEQ ID NO: 129, SEQ ID NO: 130, SEQ ID NO: 131, SEQ ID NO: 132, SEQ ID NO: 133, SEQ ID NO: 134, SEQ ID NO: 135, SEQ ID NO: 136, SEQ ID NO: 137, SEQ ID NO: 138, SEQ ID NO: 139, SEQ ID NO: 140, SEQ ID NO: 141, SEQ ID NO: 142, SEQ ID NO: 143, SEQ ID NO: 144, SEQ ID NO: 145, SEQ ID NO: 146, SEQ ID NO: 147, SEQ ID NO: 148, SEQ ID NO: 149, SEQ ID NO: 150, SEQ ID NO: 151, SEQ ID NO: 152, SEQ ID NO: 153, SEQ ID NO: 154, SEQ ID NO: 155, SEQ ID NO: 156, SEQ ID NO: 157, SEQ ID NO: 158, SEQ ID NO: 159, SEQ ID NO: 160, SEQ ID NO: 161, SEQ ID NO: 162, SEQ ID NO: 163, SEQ ID NO: 164, SEQ ID NO: 165, SEQ ID NO: 166, SEQ ID NO: 167, SEQ ID NO: 168, SEQ ID NO: 169, SEQ ID NO: 170, SEQ ID NO: 171, SEQ ID NO: 172, SEQ ID NO: 173, SEQ ID NO: 174, SEQ ID NO: 175, SEQ ID NO: 176, SEQ ID NO: 177, SEQ ID NO: 178, SEQ ID NO: 179, SEQ ID NO: 180, SEQ ID NO: 181, SEQ ID NO: 182, SEQ ID NO: 183, SEQ ID NO: 184, SEQ ID NO: 185, SEQ ID NO: 186, SEQ ID NO: 187, SEQ ID NO: 188, SEQ ID NO: 189, SEQ ID NO: 190, SEQ ID NO: 191, SEQ ID NO: 192, SEQ ID NO: 193, SEQ ID NO: 194, SEQ ID NO: 195, SEQ ID NO: 196, SEQ ID NO: 197, SEQ ID NO: 198, SEQ ID NO: 199, SEQ ID NO: 200, SEQ ID NO: 201, SEQ ID NO: 202, SEQ ID NO: 203, SEQ ID NO: 204, SEQ ID NO: 205, SEQ ID NO: 206, SEQ ID NO: 207, SEQ ID NO: 208, SEQ ID NO: 209, SEQ ID NO: 210, SEQ ID NO: 211, SEQ ID NO: 212, SEQ ID NO: 213, SEQ ID NO: 214, SEQ ID NO: 215, SEQ ID NO: 216, SEQ ID NO: 217, SEQ ID NO: 218, SEQ ID NO: 219, SEQ ID NO: 220, SEQ ID NO: 221, SEQ ID NO: 222, SEQ ID NO: 223, SEQ ID NO: 224, SEQ ID NO: 225, SEQ ID NO: 226, SEQ ID NO: 227, SEQ ID NO: 228, SEQ ID NO: 229, SEQ ID NO: 230, SEQ ID NO: 231, SEQ ID NO: 232, SEQ ID NO: 233, SEQ ID NO: 234, SEQ ID NO: 235, SEQ ID NO: 236, SEQ ID NO: 237, SEQ ID NO: 238, SEQ ID NO: 239, SEQ ID NO: 240, SEQ ID NO: 241, SEQ ID NO: 242, SEQ ID NO: 243, SEQ ID NO: 244, SEQ ID NO: 245, SEQ ID NO: 246, SEQ ID NO: 247, SEQ ID NO: 248, SEQ ID NO: 249, SEQ ID NO: 250, SEQ ID NO: 251, SEQ ID NO: 252, SEQ ID NO: 253, SEQ ID NO: 254, SEQ ID NO: 255, SEQ ID NO: 256, SEQ ID NO: 257, SEQ ID NO: 258, SEQ ID NO: 259, SEQ ID NO: 260, SEQ ID NO: 261, SEQ ID NO: 262, SEQ ID NO: 263, SEQ ID NO: 264, SEQ ID NO: 265, SEQ ID NO: 266, SEQ ID NO: 267, SEQ ID NO: 268, SEQ ID NO: 269, SEQ ID NO: 270, SEQ ID NO: 271, SEQ ID NO: 272, SEQ ID NO: 273, SEQ ID NO: 274, SEQ ID NO: 275, SEQ ID NO: 276, SEQ ID NO: 277, SEQ ID NO: 278, SEQ ID NO: 279, SEQ ID NO: 280, SEQ ID NO: 281, SEQ ID NO: 282, SEQ ID NO: 283, SEQ ID NO: 284, SEQ ID NO: 285, SEQ ID NO: 286, SEQ ID NO: 287, SEQ ID NO: 288, SEQ ID NO: 289, SEQ ID NO: 290, SEQ ID NO: 291, SEQ ID NO: 292, SEQ ID NO: 293, SEQ ID NO: 294, SEQ ID NO: 295, SEQ ID NO: 296, SEQ ID NO: 297, SEQ ID NO: 298, SEQ ID NO: 299, SEQ ID NO: 300, SEQ ID NO: 301, SEQ ID NO: 302, SEQ ID NO: 303, SEQ ID NO: 304, SEQ ID NO: 305, SEQ ID NO: 306, SEQ ID NO: 307, SEQ ID NO: 308, SEQ ID NO: 309, SEQ ID NO: 310, SEQ ID NO: 311, SEQ ID NO: 312, SEQ ID NO: 313, SEQ ID NO: 314, SEQ ID NO: 315, SEQ ID NO: 316, SEQ ID NO: 317, SEQ ID NO: 318, SEQ ID NO: 319, SEQ ID NO: 320, SEQ ID NO: 321, SEQ ID NO: 322, SEQ ID NO: 323, SEQ ID NO: 324, SEQ ID NO: 325, SEQ ID NO: 326, SEQ ID NO: 327, SEQ ID NO: 328, SEQ ID NO: 329, SEQ ID NO: 330, SEQ ID NO: 331, SEQ ID NO: 332, SEQ ID NO: 333, SEQ ID NO: 334, SEQ ID NO: 335, SEQ ID NO: 336, SEQ ID NO: 337, SEQ ID NO: 338, SEQ ID NO: 339, SEQ ID NO: 340, SEQ ID NO: 341, SEQ ID NO: 342, SEQ ID NO: 343, SEQ ID NO: 344, SEQ ID NO: 345, SEQ ID NO: 346, SEQ ID NO: 347, SEQ ID NO: 348, SEQ ID NO: 349, SEQ ID NO: 350, SEQ ID NO: 351, SEQ ID NO: 352, SEQ ID NO: 353, SEQ ID NO: 354, SEQ ID NO: 355, SEQ ID NO: 356, SEQ ID NO: 357, SEQ ID NO: 358, SEQ ID NO: 359, SEQ ID NO: 360, SEQ ID NO: 361, SEQ ID NO: 362, SEQ ID NO: 363, SEQ ID NO: 364, SEQ ID NO: 365, SEQ ID NO: 366, SEQ ID NO: 367, SEQ ID NO: 368, SEQ ID NO: 369, SEQ ID NO: 370, SEQ ID NO: 371, SEQ ID NO: 372, SEQ ID NO: 373, SEQ ID NO: 374, SEQ ID NO: 375, SEQ ID NO: 376, SEQ ID NO: 377, SEQ ID NO: 378, SEQ ID NO: 379, SEQ ID NO: 380, SEQ ID NO: 381, SEQ ID NO: 382, SEQ ID NO: 383, SEQ ID NO: 384, SEQ ID NO: 385, SEQ ID NO: 386, SEQ ID NO: 387, SEQ ID NO: 388, SEQ ID NO: 389, SEQ ID NO: 390, SEQ ID NO: 391, SEQ ID NO: 392, SEQ ID NO: 393, SEQ ID NO: 394, SEQ ID NO: 395, SEQ ID NO: 396, SEQ ID NO: 397, SEQ ID NO: 398, SEQ ID NO: 399, SEQ ID NO: 400, SEQ ID NO: 401, SEQ ID NO: 402, SEQ ID NO: 403, SEQ ID NO: 404, SEQ ID NO: 405, SEQ ID NO: 406, SEQ ID NO: 407, SEQ ID NO: 408, SEQ ID NO: 409, SEQ ID NO: 410, SEQ ID NO: 411, SEQ ID NO: 412, SEQ ID NO: 413, SEQ ID NO: 414, SEQ ID NO: 415, SEQ ID NO: 416, SEQ ID NO: 417, SEQ ID NO: 418, SEQ ID NO: 419, SEQ ID NO: 420, SEQ ID NO: 421, SEQ ID NO: 422, SEQ ID NO: 423, SEQ ID NO: 424, SEQ ID NO: 425, SEQ ID NO: 426, SEQ ID NO: 427, SEQ ID NO: 428, SEQ ID NO: 429, SEQ ID NO: 430, SEQ ID NO: 431, SEQ ID NO: 432, SEQ ID NO: 433, SEQ ID NO: 434, SEQ ID NO: 435, SEQ ID NO: 436, SEQ ID NO: 437, SEQ ID NO: 438, SEQ ID NO: 439, SEQ ID NO: 440, SEQ ID NO: 441, SEQ ID NO: 442, SEQ ID NO: 443, SEQ ID NO: 444, SEQ ID NO: 445, SEQ ID NO: 446, SEQ ID NO: 447, SEQ ID NO: 448, SEQ ID NO: 449, SEQ ID NO: 450, SEQ ID NO: 451, SEQ ID NO: 452, SEQ ID NO: 453, SEQ ID NO: 454, SEQ ID NO: 455, SEQ ID NO: 456, SEQ ID NO: 457, SEQ ID NO: 458, SEQ ID NO: 459, SEQ ID NO: 460, SEQ ID NO: 461, SEQ ID NO: 462, SEQ ID NO: 463, SEQ ID NO: 464, SEQ ID NO: 465, SEQ ID NO: 466, SEQ ID NO: 467, SEQ ID NO: 468, SEQ ID NO: 469, SEQ ID NO: 470, SEQ ID NO: 471, SEQ ID NO: 472, SEQ ID NO: 473, SEQ ID NO: 474, SEQ ID NO: 475, SEQ ID NO: 476, SEQ ID NO: 477, SEQ ID NO: 478, SEQ ID NO: 479, SEQ ID NO: 480, SEQ ID NO: 481, SEQ ID NO: 482, SEQ ID NO: 483, SEQ ID NO: 484, SEQ ID NO: 485, SEQ ID NO: 486, SEQ ID NO: 487, SEQ ID NO: 488, SEQ ID NO: 489, SEQ ID NO: 490, SEQ ID NO: 491, SEQ ID NO: 492, SEQ ID NO: 493, SEQ ID NO: 494, SEQ ID NO: 495, SEQ ID NO: 496, SEQ ID NO: 497, SEQ ID NO: 498, SEQ ID NO: 499, SEQ ID NO: 500, SEQ ID NO: 501, SEQ ID NO: 502, SEQ ID NO: 503, SEQ ID NO: 504, SEQ ID NO: 505, SEQ ID NO: 506, SEQ ID NO: 507, SEQ ID NO: 508, SEQ ID NO: 509, SEQ ID NO: 510, SEQ ID NO: 511, SEQ ID NO: 512, SEQ ID NO: 513, SEQ ID NO: 514, SEQ ID NO: 515, SEQ ID NO: 516, SEQ ID NO: 517, SEQ ID NO: 518, SEQ ID NO: 519, SEQ ID NO: 520, SEQ ID NO: 521, SEQ ID NO: 522, SEQ ID NO: 523, SEQ ID NO: 524, SEQ ID NO: 525, SEQ ID NO: 526, SEQ ID NO: 527, SEQ ID NO: 528, SEQ ID NO: 529, SEQ ID NO: 530, SEQ ID NO: 531, SEQ ID NO: 532, SEQ ID NO: 533, SEQ ID NO: 534, SEQ ID NO: 535, SEQ ID NO: 536, SEQ ID NO: 537, SEQ ID NO: 538, SEQ ID NO: 539, SEQ ID NO: 540, SEQ ID NO: 541, SEQ ID NO: 542, SEQ ID NO: 543, SEQ ID NO: 544, SEQ ID NO: 545, SEQ ID NO: 546, SEQ ID NO: 547, SEQ ID NO: 548, SEQ ID NO: 549, SEQ ID NO: 550, SEQ ID NO: 551, SEQ ID NO: 552, SEQ ID NO: 553, SEQ ID NO: 554, SEQ ID NO: 555, SEQ ID NO: 556, SEQ ID NO: 557, SEQ ID NO: 558, SEQ ID NO: 559, SEQ ID NO: 560, SEQ ID NO: 561, SEQ ID NO: 562, SEQ ID NO: 563, SEQ ID NO: 564, SEQ ID NO: 565, SEQ ID NO: 566, SEQ ID NO: 567, SEQ ID NO: 568, SEQ ID NO: 569, SEQ ID NO: 570 SEQ ID NO: 571, SEQ ID NO: 572, SEQ ID NO: 573, SEQ ID NO: 574, SEQ ID NO: 575, SEQ ID NO: 576, SEQ ID NO: 577, SEQ ID NO: 578, SEQ ID NO: 579, SEQ ID NO:,580, SEQ ID NO: 581, SEQ ID NO: 582, SEQ ID NO: 583, SEQ ID NO: 584, SEQ ID NO: 585, SEQ ID NO: 586, SEQ ID NO: 587, SEQ ID NO: 588, SEQ ID NO: 589, SEQ ID NO: 590, SEQ ID NO: 591, SEQ ID NO: 592, SEQ ID NO: 593, SEQ ID NO: 594, SEQ ID NO: 595, SEQ ID NO: 596, SEQ ID NO: 597, SEQ ID NO: 598, SEQ ID NO: 599, SEQ ID NO: 600, SEQ ID NO: 601, SEQ ID NO: 602, SEQ ID NO: 603, SEQ ID NO: 604, SEQ ID NO: 605, SEQ ID NO: 606, SEQ ID NO: 607, SEQ ID NO: 608, SEQ ID NO: 609, SEQ ID NO: 610, SEQ ID NO: 611, SEQ ID NO: 612, SEQ ID NO: 613, SEQ ID NO: 614, SEQ ID NO: 615, SEQ ID NO: 616, SEQ ID NO: 617, SEQ ID NO: 618, SEQ ID NO: 619, SEQ ID NO: 620, SEQ ID NO: 621, SEQ ID NO: 622, and SEQ ID NO: 623,
or to a complement of said sequence.

4. The polynucleotide of any one of claims 1-3, wherein said polynucleotide is operably linked to at least one expression control sequence.

5. A vector comprising the polynucleotide of claim 4.

6. A host cell transformed with a vector comprising the polynucleotide of any one of claims 1-3.

7. A process for producing a protein encoded by the polynucleotide of claim 4, which process comprises:
(a) growing a culture of a host cell in a suitable culture medium, wherein the host cell has been transformed with the polynucleotide of claim 4; and
(b) purifying said protein from the culture.

8. A protein produced according to the process of claim 7.

9. An antibody that specifically binds to the protein of claim 8.

10. A method for detecting the protein of claim 8, comprising contacting a sample suspected of containing the protein with an antibody that specifically binds to the protein, under conditions such that the antibody binds the protein and the protein is detected.

11. A method for detecting the polynucleotide of any one of claims 1-3, comprising contacting a sample suspected of containing the polynucleotide with a polynucleotide reagent that hybridizes to the polynucleotide, under conditions such that the reagent binds the polynucleotide and the polynucleotide is detected.

12. The method of claim 10, wherein the sample is a biological sample.

13. The method of claim 12, where the biological sample is isolated from a human.

14. The method of claim 11, wherein the sample is a biological sample.

15. The method of claim 14, where the biological sample is isolated from a human.

16. A method of identifying a compound that modulates the activity of the protein of claim 8, comprising contacting a composition comprising the protein with a test compound and monitoring the effect of the test compound on the activity of the protein, such that a modulatory compound is identified.

17. A method of identifying a compound that modulates the expression of the polynucleotide of any one of claims 1-3, comprising contacting a cell that expresses the polynucleotide with a test compound and determining the effect of the test compound on the expression of the polynucleotide, such that a modulatory compound is identified.

18. A method of identifying a compound that modulates the production of the protein of claim 8, comprising contacting a cell that produces the protein with the test compound and determining the effect of the test compound on the production of the protein, such that a modulatory compound is identified.

19. A method of treating a subject having a disorder characterized by aberrant expression of the polynucleotide of any one of claims 1-3, comprising administering to said subject a therapeutically effective amount of a compound that modulates expression of the polypeptide, such that treatment is effected.

20. A method of treating a subject having a disorder characterized by aberrant production of the protein of claim 8, comprising administering to said subject a therapeutically effective amount of a compound that modulates production of the protein, such that treatment is effected.

21. A method of treating a subject having a disorder characterized by aberrant activity of the protein of claim 8, comprising administering to said subject a therapeutically effective amount of a compound that modulates activity of the protein, such that treatment is effected.
